(19) United States
(12) Patent Application Publication
(10) Pub. No.: US 2025/0171544 A1
(43) Pub. Date: May 29, 2025

(54) NUCLEIC ACID-POLYPEPTIDE COMPOSITIONS AND USES THEREOF

(71) Applicant: Avidity Biosciences, Inc., San Diego, CA (US)

(72) Inventors: Andrew John GEALL, Carlsbad, CA (US); Venkata Ramana DOPPALAPUDI, San Diego, CA (US); David Sai-Ho CHU, La Jolla, CA (US); Michael Caramian COCHRAN, La Jolla, CA (US); Rachel Elizabeth JOHNS, San Diego, CA (US); Palani BALU, Cupertino, CA (US); Rob BURKE, Encinitas, CA (US); Beatrice Diana DARIMONT, San Diego, CA (US)

(21) Appl. No.: 19/031,247

(22) Filed: Jan. 17, 2025

Related U.S. Application Data
(63) Continuation of application No. 17/308,888, filed on May 5, 2021.
Application No. 17/308,888 is a continuation of application No. 17/187,669, filed on Feb. 26, 2021, now Pat. No. 12,234,290.
Application No. 17/187,669 is a continuation of application No. 15/476,849, filed on Mar. 31, 2017, now abandoned.
(60) Provisional application No. 62/316,919, filed on Apr. 1, 2016.

(51) Int. Cl. C07K 16/28; A61K 31/7088; A61K 31/713; A61K 39/00; A61K 47/60; A61K 47/68; A61K 48/00; A61P 35/00; A61P 35/02; C07K 16/30; C12N 15/113; C12N 15/88

(52) U.S. Cl. CPC C07K 16/2863; A61K 31/7088; A61K 31/713; A61K 47/60; A61K 47/6807; A61K 47/6851; A61K 47/6889; A61K 48/0033; A61K 48/005; A61K 48/0075; A61P 35/00; A61P 35/02; C07K 16/2851; C07K 16/30; C07K 16/3061; C12N 15/113; C12N 15/1135; C12N 15/1138; C12N 15/88; A61K 2039/505; C07K 2317/21; C07K 2317/24; C07K 2317/55; C07K 2317/569; C07K 2317/622; C12N 2310/14; C12N 2310/315; C12N 2310/321; C12N 2310/3231; C12N 2310/332; C12N 2310/3513; C12N 2310/3515; C12N 2320/32

(57) ABSTRACT

Disclosed herein are compositions and pharmaceutical formulations that comprise a binding moiety conjugated to a polynucleic acid molecule and a polymer. Also described herein include methods for treating a cancer which utilize a composition or a pharmaceutical formulation comprising a binding moiety conjugated to a polynucleic acid molecule and a polymer.

### CROSS-REFERENCE

[0001] This application is a continuation of U.S. application Ser. No. 17/308,888, filed May 5, 2021, which is a continuation of U.S. application Ser. No. 17/187,669, filed Feb. 26, 2021, which is a continuation of U.S. application Ser. No. 15/476,849, filed Mar. 31, 2017, which claims the benefit of U.S. Provisional Application No. 62/316,919, filed Apr. 1, 2016, each of which is incorporated herein by reference.

### SEQUENCE LISTING

[0002] The instant application contains a Sequence Listing which has been submitted electronically in XML format and is hereby incorporated by reference in its entirety. Said XML copy, created on Jan. 17, 2025, is named 45532-707_309_SL.xml and is 12,585,197 bytes in size.

### BACKGROUND OF THE DISCLOSURE

[0003] Gene suppression by RNA-induced gene silencing provides several levels of control: transcription inactivation, small interfering RNA (siRNA)-induced mRNA degradation, and siRNA-induced transcriptional attenuation. In some instances, RNA interference (RNAi) provides long lasting effect over multiple cell divisions. As such, RNAi represents a viable method useful for drug target validation, gene function analysis, pathway analysis, and disease therapeutics.

### SUMMARY OF THE DISCLOSURE

[0004] Disclosed herein, in certain embodiments, are compositions and pharmaceutical formulations that comprise a binding moiety conjugated to a polynucleic acid molecule and a polymer. In some embodiments, also described herein include methods for treating a disease or condition (e.g., cancer) that utilize a composition or a pharmaceutical formulation comprising a binding moiety conjugated to a polynucleic acid molecule and a polymer.

[0005] Disclosed herein, in certain embodiments, is a molecule of Formula (I):

A-X—B—Y—C Formula I
[0006] wherein,
   [0007] A is a binding moiety;
   [0008] B is a polynucleotide;
   [0009] C is a polymer;
   [0010] X is a bond or first linker; and
   [0011] Y is a bond or second linker; and
[0012] wherein the polynucleotide comprises at least one 2′ modified nucleotide, at least one modified internucleotide linkage, or at least one inverted abasic moiety.

[0013] In some embodiments, the at least one 2′ modified nucleotide comprises 2′-O-methyl, 2′-O-methoxyethyl (2′-O-MOE), 2′-O-aminopropyl, 2′-deoxy, T-deoxy-2′-fluoro, 2′-O-aminopropyl (2′-O-AP), 2′-O-dimethylaminoethyl (2′-O-DMAOE), 2′-O-dimethylaminopropyl (2′-O-DMAP), T-O-dimethylaminoethyloxyethyl (2′-O-DMAEOE), or 2′-O—N-methylacetamido (2′-O-NMA) modified nucleotide. In some embodiments, the at least one 2′ modified nucleotide comprises locked nucleic acid (LNA) or ethylene nucleic acid (ENA). In some embodiments, the at least one modified internucleotide linkage comprises a phosphorothioate linkage or a phosphorodithioate linkage. In some embodiments, the at least one inverted abasic moiety is at at least one terminus.

[0014] In some embodiments, the polynucleotide comprises a single strand. In some embodiments, the polynucleotide comprises two or more strands. In some embodiments, the polynucleotide comprises a first polynucleotide and a second polynucleotide hybridized to the first polynucleotide to form a double-stranded polynucleic acid molecule. In some embodiments, the second polynucleotide comprises at least one modification.

[0015] In some embodiments, the first polynucleotide and the second polynucleotide are RNA molecules. In some embodiments, the first polynucleotide and the second polynucleotide are siRNA molecules.

[0016] In some embodiments, the first polynucleotide comprises a sequence having at least 60%, 65%, 70%, 75%, 80%, 85%, 90%, 95%, 96%, 97%, 98%, 99%, or 100% sequence identity to SEQ ID NOs: 16-75, 452-1955, 1956-1962, 1967-2002, 2013-2032, 2082-2109, or 2117. In some embodiments, the first polynucleotide consists of a sequence selected from SEQ ID NOs: 16-75, 452-1955, 1956-1962, 1967-2002, 2013-2032, 2082-2109, or 2117.

[0017] In some embodiments, the second polynucleotide comprises a sequence having at least 60%, 65%, 70%, 75%, 80%, 85%, 90%, 95%, 96%, 97%, 98%, 99%, or 100% sequence identity to SEQ ID NOs: 16-75, 452-1955, 1956-1962, 1967-2002, 2013-2032, 2082-2109, or 2117. In some embodiments, the second polynucleotide consists of a sequence selected from SEQ ID NOs: 16-75, 452-1955, 1956-1962, 1967-2002, 2013-2032, 2082-2109, or 2117.

[0018] In some embodiments, X and Y are independently a bond or a non-polymeric linker group. In some embodiments, X is a bond. In some embodiments, X is a C₁-C₆ alkyl group. In some embodiments, Y is a C₁-C₆ alkyl group. In some embodiments, X is a homobifuctional linker or a heterobifunctional linker, optionally conjugated to a C₁-C₆ alkyl group. In some embodiments, Y is a homobifuctional linker or a heterobifunctional linker.

[0019] In some embodiments, the binding moiety is an antibody or binding fragment thereof. In some embodiments, the antibody or binding fragment thereof comprises a humanized antibody or binding fragment thereof, chimeric antibody or binding fragment thereof, monoclonal antibody or binding fragment thereof, monovalent Fab′, divalent Fab2, single-chain variable fragment (scFv), diabody, minibody, nanobody, single-domain antibody (sdAb), or camelid antibody or binding fragment thereof. In some embodiments, the antibody or binding fragment thereof is an anti-EGFR antibody or binding fragment thereof.

[0020] In some embodiments, C is polyethylene glycol. In some embodiments, C has a molecular weight of about 5000 Da.

[0021] In some embodiments, A-X is conjugated to the 5′ end of B and Y—C is conjugated to the 3′ end of B. In some embodiments, Y—C is conjugated to the 5′ end of B and A-X is conjugated to the 3′ end of B. In some embodiments, A-X, Y—C or a combination thereof is conjugated to an internucleotide linkage group.

[0022] In some embodiments, the molecule further comprises D. In some embodiments, D is conjugated to C or to A.

[0023] In some embodiments, D is conjugated to the molecule of Formula (I) according to Formula (II):

(A-X—B—Y—Cₙ)-L-D Formula II
[0024] wherein,
   [0025] A is a binding moiety;
   [0026] B is a polynucleotide;
   [0027] C is a polymer;
   [0028] X is a bond or first linker;
   [0029] Y is a bond or second linker;
   [0030] L is a bond or third linker;
   [0031] D is an endosomolytic moiety; and
   [0032] n is an integer between 0 and 1; and
[0033] wherein the polynucleotide comprises at least one 2′ modified nucleotide, at least one modified internucleotide linkage, or at least one inverted abasic moiety; and D is conjugated anywhere on A, B, or C.

[0034] In some embodiments, D is INF7 or melittin.

[0035] In some embodiments, D is an endosomolytic polymer.

[0036] In some embodiments, L is a C₁-C₆ alkyl group. In some embodiments, L is a homobifuctional linker or a heterobifunctional linker.

[0037] In some embodiments, the molecule further comprises at least a second binding moiety A. In some embodiments, the at least second binding moiety A is conjugated to A, to B, or to C. In some embodiments, the at least second binding moiety A is cholesterol.

[0038] In some embodiments, the molecule further comprises at least an additional polynucleotide B. In some embodiments, the at least an additional polynucleotide B is conjugated to A, to B, or to C.

[0039] In some embodiments, the molecule further comprises at least an additional polymer C. In some embodiments, the at least an additional polymer C is conjugated to A, to B, or to C.

[0040] Disclosed herein, in certain embodiments, is a molecule of Formula (I): A-X—B—Y—C(Formula I), wherein A is an antibody or its binding fragments thereof; B is a polynucleotide; C is a polymer; X is a bond or first non-polymeric linker; and Y is a bond or second linker; wherein the polynucleotide comprises at least one 2′ modified nucleotide, at least one modified internucleotide linkage, or at least one inverted abasic moiety; and wherein A and C are not attached to B at the same terminus. In some embodiments, the at least one 2′ modified nucleotide comprises 2′-O-methyl, 2′-O-methoxyethyl (2′-O-MOE), 2′-O-aminopropyl, 2′-deoxy, T-deoxy-2′-fluoro, 2′-O-aminopropyl (2′-O-AP), 2′-O-dimethylaminoethyl (2′-O-DMAOE), 2′-O-dimethylaminopropyl (2′-O-DMAP), T-O-dimethylaminoethyloxyethyl (2′-O-DMAEOE), or 2′-O—N-methylacetamido (2′-O-NMA) modified nucleotide. In some embodiments, the at least one 2′ modified nucleotide comprises locked nucleic acid (LNA) or ethylene nucleic acid (ENA). In some embodiments, the at least one modified internucleotide linkage comprises a phosphorothioate linkage or a phosphorodithioate linkage. In some embodiments, the at least one inverted abasic moiety is at at least one terminus. In some embodiments, the polynucleotide comprises a single strand. In some embodiments, the polynucleotide comprises a first polynucleotide and a second polynucleotide hybridized to the first polynucleotide to form a double-stranded polynucleic acid molecule. In some embodiments, the second polynucleotide comprises at least one modification. In some embodiments, the first polynucleotide and the second polynucleotide are RNA molecules. In some embodiments, the first polynucleotide comprises a sequence having at least 80%, 85%, 90%, 95%, 96%, 97%, 98%, 99%, or 100% sequence identity to SEQ ID NOs: 16-75, 452-1955, 1956-1962, 1967-2002, 2013-2032, 2082-2109, or 2117. In some embodiments, the second polynucleotide comprises a sequence having at least 80%, 85%, 90%, 95%, 96%, 97%, 98%, 99%, or 100% sequence identity to SEQ ID NOs: 16-75, 452-1955, 1956-1962, 1967-2002, 2013-2032, 2082-2109, or 2117. In some embodiments, Y is a non-polymeric linker group. In some embodiments, X is a bond. In some embodiments, X is a C₁-C₆ alkyl group. In some embodiments, Y is a C₁-C₆ alkyl group. In some embodiments, X is a homobifuctional linker or a heterobifunctional linker, optionally conjugated to a C₁-C₆ alkyl group. In some embodiments, Y is a homobifuctional linker or a heterobifunctional linker. In some embodiments, the antibody or binding fragment thereof comprises a humanized antibody or binding fragment thereof, chimeric antibody or binding fragment thereof, monoclonal antibody or binding fragment thereof, monovalent Fab′, divalent Fab2, single-chain variable fragment (scFv), diabody, minibody, nanobody, single-domain antibody (sdAb), or camelid antibody or binding fragment thereof. In some embodiments, C is polyethylene glycol. In some embodiments, C has a molecular weight of about 1000 Da, 2000 Da, or 5000 Da. In some embodiments, A-X is conjugated to the 5′ end of B and Y—C is conjugated to the 3′ end of B. In some embodiments, Y—C is conjugated to the 5′ end of B and A-X is conjugated to the 3′ end of B. In some embodiments, the molecule further comprises D. In some embodiments, D is conjugated to C or to A. In some embodiments, D is conjugated to the molecule of Formula (I) according to Formula (II): (A-X—B—Y—C_{c})-L-D (Formula II), wherein A is an antibody or its binding fragments thereof; B is a polynucleotide; C is a polymer; X is a bond or first non-polymeric linker; Y is a bond or second linker; L is a bond or third linker; D is an endosomolytic moiety; and c is an integer between 0 and 1; wherein the polynucleotide comprises at least one 2′ modified nucleotide, at least one modified internucleotide linkage, or at least one inverted abasic moiety; wherein A and C are not attached to B at the same terminus; and wherein D is conjugated anywhere on A or C or to a terminus of B. In some embodiments, D is INF7 or melittin. In some embodiments, D is an endosomolytic polymer. In some embodiments, L is a C₁-C₆ alkyl group. In some embodiments, L is a homobifuctional linker or a heterobifunctional linker. In some embodiments, the molecule further comprises at least a second binding moiety. In some embodiments, the at least second binding moiety is conjugated to A, to B, or to C. In some embodiments, the at least second binding moiety is cholesterol. In some embodiments, the molecule further comprises at least an additional polynucleotide B. In some embodiments, the at least an additional polynucleotide B is conjugated to A, to B, or to C. In some embodiments, the molecule further comprises at least an additional polymer C. In some embodiments, the at least an additional polymer C is conjugated to A, to B, or to C.

[0041] Disclosed herein, in certain embodiments, is a pharmaceutical composition comprising a molecule described above, and a pharmaceutically acceptable excipient. In some embodiments, the pharmaceutical composition is formulated as a nanoparticle formulation. In some embodiments, the pharmaceutical composition is formulated for parenteral, oral, intranasal, buccal, rectal, or transdermal administration.

[0042] Disclosed herein, in certain embodiments, is a method of treating a disease or disorder in a patient in need thereof, comprising administering to the patient a composition comprising a molecule described above. In some embodiments, the disease or disorder is a cancer. In some embodiments, the cancer is a solid tumor. In some embodiments, the cancer is a hematologic malignancy. In some embodiments, the cancer comprises a KRAS-associated, an EGFR-associated, an AR-associated cancer, a β-catenin associated cancer, a PIK3C-associated cancer, or a MYC-associated cancer. In some embodiments, the cancer comprises bladder cancer, breast cancer, colorectal cancer, endometrial cancer, esophageal cancer, glioblastoma multiforme, head and neck cancer, kidney cancer, lung cancer, ovarian cancer, pancreatic cancer, prostate cancer, or thyroid cancer. In some embodiments, the cancer comprises acute myeloid leukemia, CLL, DLBCL, or multiple myeloma. In some embodiments, the method is an immuno-oncology therapy.

[0043] Disclosed herein, in certain embodiments, is a method of inhibiting the expression of a target gene in a primary cell of a patient, comprising administering a molecule described above to the primary cell. In some embodiments, the method is an in vivo method. In some embodiments, the patient is a human.

[0044] Disclosed herein, in certain embodiments, is an immuno-oncology therapy comprising a molecule described above for the treatment of a disease or disorder in a patient in need thereof.

[0045] Disclosed herein, in certain embodiments, is a kit comprising a molecule described above.

### BRIEF DESCRIPTION OF THE DRAWINGS

[0046] Various aspects of the disclosure are set forth with particularity in the appended claims. A better understanding of the features and advantages of the present disclosure will be obtained by reference to the following detailed description that sets forth illustrative embodiments, in which the principles of the disclosure are utilized, and the accompanying drawings below. The patent application file contains at least one drawing executed in color. Copies of this patent application publication with color drawing(s) will be provided by the Office upon request and payment of the necessary fee.

[0047] FIG. 1A-FIG. 1C illustrate cartoon representations of molecules described herein.

[0048] FIG. 2 illustrates a structure of cholesterol conjugate passenger strand.

[0049] FIG. 3 shows an INF7 peptide sequence (SEQ ID NO: 2055) described herein.

[0050] FIG. 4 shows a melittin peptide sequence (SEQ ID NO: 2060) described herein.

[0051] FIG. 5 illustrates an analytical HPLC of EGFR antibody-PEG20 kDa-EGFR.

[0052] FIG. 6 illustrates a SDS-PAGE analysis of EGFR antibody-PEG20 kDa-EGFR conjugate.

[0053] FIG. 7 illustrates an analytical chromatogram of EGFR antibody-PEG10 kDa-EGFR siRNA.

[0054] FIG. 8 shows an analytical chromatogram of EGFR antibody-PEG5 kDa-EGFR siRNA.

[0055] FIG. 9 shows a SDS PAGE analysis of EGFR antibody-PEG10 kDa-EGFR siRNA and EGFR antibody-PEG5 kDa-EGFR siRNA conjugates.

[0056] FIG. 10 illustrates the overlay of EGFR antibody-PEG1 kDa-EGFR siRNA conjugates with siRNA loading of 1, 2 and 3.

[0057] FIG. 11 shows a HPLC chromatogram of EGFR antibody-KRAS-PEG5 kDa.

[0058] FIG. 12 shows a HPLC chromatogram of Panitumumab-KRAS-PEG5 kDa.

[0059] FIG. 13 shows a HPLC chromatogram of EGFR antibody-S—S-siRNA-PEG5 kDa (DAR=1).

[0060] FIG. 14 shows a HPLC chromatogram of EGFR antibody-PEG24-Melittin (loading=˜1).

[0061] FIG. 15 illustrates a HPLC chromatogram of EGFR antibody-Melittin (n=˜1).

[0062] FIG. 16 illustrates a mass spectrum of EGFR antibody-Melittin (n=1).

[0063] FIG. 17 shows a HIC chromatogram of EGFR antibody-PEG1 kDa-INF7 (Peptide loading=˜1).

[0064] FIG. 18 shows a HPLC chromatogram of EGFR antibody-INF7 (Peptide Loading=˜1).

[0065] FIG. 19 shows INF7-PEG1 kDa-(EGFR antibody-KRAS-PEG5 kDa).

[0066] FIG. 20 illustrates Melittin-PEG1 kDa-(EGFR antibody-KRAS-PEG5 kDa).

[0067] FIG. 21 illustrates plasma concentration-time profiles out to 96 h post-dose with the siRNA concentration expressed as a percent of injected dose (% ID).

[0068] FIG. 22 shows plasma concentration-time profiles out to 96 h post-dose with the siRNA concentration expressed as a percent of injected dose (% ID).

[0069] FIG. 23 shows plasma concentration-time profiles out to 96 h post-dose with the siRNA concentration expressed as a percent of injected dose (% ID).

[0070] FIG. 24 illustrates plasma concentration-time profiles out to 96 h post-dose with the siRNA concentration expressed as a percent of injected dose (% ID).

[0071] FIG. 25 illustrates plasma concentration-time profiles out to 24 h post-dose with the siRNA concentration expressed as a percent of injected dose (% ID).

[0072] FIG. 26A and FIG. 26B illustrate tissue concentration-time profiles in tumor or normal livers of mice. FIG. 26A shows tissue concentration-time profiles out to 168 h post-dose measured in s.c. flank H358 tumors in a mice model. FIG. 26B shows tissue concentration-time profiles out to 168 h post-dose measured in normal livers of mice.

[0073] FIG. 27 shows tissue concentration-time profiles out to 168 h post-dose measured in s.c. flank H358 tumors and normal livers of mice.

[0074] FIG. 28 illustrates tissue concentration-time profiles out to 168 h post-dose measured in s.c. flank H358 tumors and normal livers of mice.

[0075] FIG. 29 illustrates tissue concentration-time profiles out to 168 h post-dose measured in s.c. flank H358 tumors and normal livers of mice.

[0076] FIG. 30 shows tissue concentration-time profiles out to 168 h post-dose measured in s.c. flank H358 tumors and normal livers of mice.

[0077] FIG. 31A and FIG. 31B illustrate siRNA-mediated mRNA knockdown of human KRAS in human s.c. flank H358 tumors (FIG. 31A) or mouse KRAS in normal mouse liver (FIG. 31B).

[0078] FIG. 32 illustrates siRNA-mediated mRNA knockdown of human EGFR in human s.c. flank H358 tumors.

[0079] FIG. 33 illustrates siRNA-mediated mRNA knockdown of human KRAS in human s.c. flank H358 tumors.

[0080] FIG. 34 illustrates siRNA-mediated mRNA knockdown of human EGFR in human s.c. flank H358 tumors.

[0081] FIG. 35 shows siRNA-mediated mRNA knockdown of mouse KRAS in mouse liver.

[0082] FIG. 36 illustrates plasma concentration-time profiles out to 96 h post-dose with the siRNA concentration expressed as a percent of injected dose (% ID).

[0083] FIG. 37 illustrates tissue concentration-time profiles out to 144 h post-dose measured in liver, kidneys, and lungs of wild-type CD-1 mice.

[0084] FIG. 38A and FIG. 38B illustrate tissue concentration-time profiles out to 144 h post-dose measured in human s.c. flank H358 tumors for chol-KRAS mixed with either chol-INF7 peptide (FIG. 38A) or chol-melittin peptide (FIG. 38B).

[0085] FIG. 39A and FIG. 39B illustrate tissue concentration-time profiles out to 144 h post-dose measured in mouse liver for chol-KRAS mixed with either chol-INF7 peptide (FIG. 39A) or chol-melittin peptide (FIG. 39B).

[0086] FIG. 40A and FIG. 40B illustrate tissue concentration-time profiles out to 144 h post-dose measured in mouse kidneys for chol-KRAS mixed with either chol-INF7 peptide (FIG. 40A) or chol-melittin peptide (FIG. 40B).

[0087] FIG. 41A and FIG. 41B illustrate tissue concentration-time profiles out to 144 h post-dose measured in mouse lungs for chol-KRAS mixed with either chol-INF7 peptide (FIG. 41A) or chol-melittin peptide (FIG. 41B).

[0088] FIG. 42 illustrates siRNA-mediated mRNA knockdown of mouse KRAS in mouse liver.

[0089] FIG. 43A and FIG. 43B illustrate tissue concentration-time profiles out to 96 h post-dose measured in human s.c. flank H358 tumors (FIG. 43A) or mouse liver (FIG. 43B).

[0090] FIG. 44A and FIG. 44B show tissue concentration-time profiles out to 96 h post-dose measured in mouse kidneys (FIG. 44A) or mouse lungs (FIG. 44B).

[0091] FIG. 45 shows siRNA-mediated mRNA knockdown of mouse KRAS in human s.c. flank H358 tumors.

[0092] FIG. 46 shows tissue concentrations of siRNA at 96 h post-dose measured in human s.c. flank H358 tumors and mouse liver, kidneys, and lungs.

[0093] FIG. 47A and FIG. 47B show siRNA-mediated mRNA knockdown in human s.c. flank H358 tumors of EGFR (FIG. 47A) or KRAS (FIG. 47B).

[0094] FIG. 48 shows siRNA-mediated mRNA knockdown of human CTNNB1 in Hep3B orthotopic liver tumors.

[0095] FIG. 49 shows human alpha-Fetoprotein in serum from mice with Hep3B orthotopic liver tumors.

[0096] FIG. 50A shows siRNA-mediated mRNA knockdown of human EGFR in LNCaP tumor.

[0097] FIG. 50B shows siRNA concentration in tumor or liver tissues at 96 hour post-dose.

[0098] FIG. 51A illustrates siRNA-mediated mRNA knockdown of human EGFR in LNCaP tumor at 96 hour.

[0099] FIG. 51B shows siRNA concentration in tumor or liver tissues at 96 hour post-dose.

[0100] FIG. 52 shows plasma siRNA concentration of exemplary molecules described herein.

[0101] FIG. 53A illustrates siRNA concentration of exemplary molecules described herein in HCC827 tumor or liver tissue.

[0102] FIG. 53B shows EGFR EGFR mRNA expression level of exemplary molecules described herein.

[0103] FIG. 54 illustrates exemplary As and Bs to generate molecules encompassed by Formula (I).

[0104] FIG. 55 illustrates EGFR mRNA expression level of exemplary molecules described herein.

[0105] FIG. 56A illustrates siRNA concentration of exemplary molecules described herein in HCC827 tumor or liver tissue.

[0106] FIG. 56B shows EGFR mRNA expression level of exemplary molecules described herein.

[0107] FIG. 57A-FIG. 57B illustrate siRNA concentration of exemplary molecules described herein in liver (FIG. 57A) and tumor (FIG. 57B).

[0108] FIG. 57C shows KRAS mRNA expression level of exemplary molecules described herein.

[0109] FIG. 58A illustrates plasma siRNA concentration of exemplary molecules described herein.

[0110] FIG. 58B shows plasma antibody concentration of exemplary molecules described herein.

[0111] FIG. 59A illustrates siRNA concentration of exemplary molecules described herein in tumor or liver tissue.

[0112] FIG. 59B shows mRNA expression level of exemplary molecules described herein in Hep3B tumor.

[0113] FIG. 60 shows CTNNB1 mRNA expression level of an exemplary molecule described herein in liver.

[0114] FIG. 61 shows KRAS mRNA expression level of an exemplary molecule described herein in liver.

[0115] FIG. 62 illustrates plasma siRNA or monoclonal antibody (mAb) concentration of exemplary molecules described herein.

[0116] FIG. 63A illustrates siRNA concentration of exemplary molecules described herein in tumor or liver tissue.

[0117] FIG. 63B shows EGFR mRNA expression level of exemplary molecules described herein in LNCaP tumor.

[0118] FIG. 64A-FIG. 64E illustrate HPRT mRNA expression level in heart (FIG. 64A), HPRT mRNA expression level in gastrointestinal tissue (FIG. 64B), HPRT mRNA expression level in liver (FIG. 64C), HPRT mRNA expression level in lung (FIG. 64D), and siRNA concentration in tissue (FIG. 64E) of exemplary molecules described herein.

[0119] FIG. 65A-FIG. 65E illustrate mRNA expression level in heart (FIG. 65A), mRNA expression level in gastrointestinal tissue (FIG. 65B), mRNA expression level in liver (FIG. 65C), mRNA expression level in lung (FIG. 65D), and siRNA concentration in tissue (FIG. 65E) of exemplary molecules described herein.

[0120] FIG. 66A-FIG. 66D illustrate siRNA concentration in heart (FIG. 66A), mRNA expression level in heart (FIG. 66B), mRNA expression level in gastrointestinal tissue (FIG. 66C), and siRNA concentration in muscle (FIG. 66D).

[0121] FIG. 67A illustrate mRNA expression level of exemplary molecules described herein.

[0122] FIG. 67B shows siRNA concentration of exemplary molecules described herein in tumor or liver tissues.

[0123] FIG. 68A-FIG. 68B illustrate anti-B cell antibody-siRNA conjugates which activate primary mouse B cells. FIG. 68A illustrates an anti-B cell Fab-siRNA conjugate. FIG. 68B shows an anti-B cell monoclonal antibody-siRNA conjugate.

[0124] FIG. 69A illustrates plasma siRNA concentration of exemplary molecules described herein.

[0125] FIG. 69B shows antibody zalutumumab concentration of exemplary molecules described herein in the plasma at a 5 mg/kg dose.

[0126] FIG. 70A shows mRNA expression level of exemplary molecules described herein.

[0127] FIG. 70B shows siRNA concentration of exemplary molecules described herein in tumor or liver tissues.

[0128] FIG. 70C shows plasma siRNA concentration of exemplary molecules described herein.

[0129] FIG. 71A illustrates siRNA concentration of exemplary molecules described herein in LNCaP tomor.

[0130] FIG. 71B-FIG. 71C illustrate mRNA expression level of exemplary molecules described herein in LNCaP tomor.

[0131] FIG. 72A illustrates siRNA concentration of exemplary molecules described herein in tissue.

[0132] FIG. 72B shows mRNA expression level of exemplary molecules described herein in HCC827 tumors at 96 h post-treatment.

[0133] FIG. 73A illustrates siRNA concentration of exemplary molecules described herein in the plasma at a 0.5 mg/kg dose.

[0134] FIG. 73B shows antibody zalutumumab concentration of exemplary molecules described herein in the plasma at a 5 mg/kg dose.

[0135] FIG. 74 illustrates plasma clearance of exemplary molecules encompassed by Formula (I) which contains different linkers.

[0136] FIG. 75A illustrates the mRNA expression level of exemplary molecules described herein in HCC827 tumor at a 0.5 mg/kg dose.

[0137] FIG. 75B-FIG. 75D illustrate siRNA concentration in tumor (FIG. 75B), liver (FIG. 75C), and plasma (FIG. 75D).

[0138] FIG. 76A-FIG. 76D illustrate mRNA expression levels of exemplary molecules described herein targeting HPRT. FIG. 76A shows the mRNA expression level in heart. FIG. 76B shows the mRNA expression level in muscle. FIG. 76C shows the mRNA expression level in liver. FIG. 76D shows the mRNA expression level in lung.

[0139] FIG. 77A-FIG. 77D illustrate siRNA concentrations of exemplary molecules encompassed by Formula (I) in muscle (FIG. 77A), heart (FIG. 77B), liver (FIG. 77C), and lung (FIG. 77D).

[0140] FIG. 78A-FIG. 78D illustrate mRNA expression levels of exemplary molecules encompassed by Formula (I) in heart (FIG. 78A), gastrointestinal tissue (FIG. 78B), liver (FIG. 78C), and lung (FIG. 78D) at 96 h post-treatment.

[0141] FIG. 79 illustrates plasma siRNA concentration of exemplary molecules encompassed by Formula (I).

[0142] FIG. 80A shows mRNA expression level of exemplary molecules encompassed by Formula (I) in LNCaP tumor at 96 h post-treatment.

[0143] FIG. 80B shows siRNA concentration of exemplary molecules encompassed by Formula (I) in LNCaP tumor, liver, kidney, lung, and spleen tissue samples.

[0144] FIG. 81A shows mRNA expression level of exemplary molecules encompassed by Formula (I) in HCC827 tumor at 96 h post-treatment.

[0145] FIG. 81B illustrates siRNA concentrations of exemplary molecules encompassed by Formula (I) in tumor, liver, kidney, lung, and spleen tissue samples.

[0146] FIG. 82 illustrates plasma siRNA concentration of exemplary molecules encompassed by Formula (I).

[0147] FIG. 83 illustrates plasma siRNA concentration of exemplary molecules encompassed by Formula (I).

[0148] FIG. 84 illustrates mRNA expression levels of exemplary molecules encompassed by Formula (I) in HCC827 tumor at 96 h post treatment.

[0149] FIG. 85 illustrates siRNA concentration in HCC827 tumor or liver tissues at 96 hour post-dose.

[0150] FIG. 86 illustrates the relative mRNA expression levels of exemplary molecules encompassed by Formula (I) in mouse splenic B cells 48 h post treatment. Each exemplary molecule is further denoted with a number.

[0151] FIG. 87 illustrates stability of exemplary molecules encompassed by Formula (I) (or ASCs) in mouse plasma.

### DETAILED DESCRIPTION OF THE DISCLOSURE

[0152] Nucleic acid (e.g., RNAi) therapy is a targeted therapy with high selectivity and specificity. However, in some instances, nucleic acid therapy is also hindered by poor intracellular uptake, limited blood stability and non-specific immune stimulation. To address these issues, various modifications of the nucleic acid composition are explored, such as for example, novel linkers for better stabilizing and/or lower toxicity, optimization of binding moiety for increased target specificity and/or target delivery, and nucleic acid polymer modifications for increased stability and/or reduced off-target effect.

[0153] In some embodiments, the arrangement or order of the different components that make-up the nucleic acid composition further effects intracellular uptake, stability, toxicity, efficacy, and/or non-specific immune stimulation. For example, if the nucleic acid component includes a binding moiety, a polymer, and a polynucleic acid molecule (or polynucleotide), the order or arrangement of the binding moiety, the polymer, and/or the polynucleic acid molecule (or polynucleotide) (e.g., binding moiety-polynucleic acid molecule-polymer, binding moiety-polymer-polynucleic acid molecule, or polymer-binding moiety-polynucleic acid molecule) further effects intracellular uptake, stability, toxicity, efficacy, and/or non-specific immune stimulation.

[0154] In some embodiments, described herein include a molecule those arrangement of the nucleic acid components effects intracellular uptake, stability, toxicity, efficacy, and/or non-specific immune stimulation. In some instances, the molecule comprises a binding moiety conjugated to a polynucleic acid molecule and a polymer. In some embodiments, the molecule comprises a molecule according to Formula (I): A-X—B—Y—C; in which A is a binding moiety, B is a polynucleotide, C is a polymer, X is a bond or first linker, and Y is a bond or second linker. In some instances, the polynucleotide comprises at least one 2′ modified nucleotide, at least one modified internucleotide linkage, or at least one inverted abasic moiety. In some instances, the molecule of Formula (I) further comprises D, an endosomolytic moiety.

[0155] In some embodiments, a molecule comprising a binding moiety conjugated to a polynucleic acid molecule and a polymer arranged as described herein enhances intracellular uptake, stability, and/or efficacy. In some instances, a molecule comprising a binding moiety conjugated to a polynucleic acid molecule and a polymer arranged as described herein reduces toxicity and/or non-specific immune stimulation. In some cases, the molecule comprises a molecule according to Formula (I): A-X—B—Y—C; in which A is a binding moiety, B is a polynucleotide, C is a polymer, X is a bond or first linker, and Y is a bond or second linker. In some instances, the polynucleotide comprises at least one 2′ modified nucleotide, at least one modified internucleotide linkage, or at least one inverted abasic moiety. In some instances, the molecule of Formula (I) further comprises D, an endosomolytic moiety.

[0156] In some embodiments, a molecule described herein is further used to treat a disease or disorder. In some instances, a molecule for the treatment of a disease or disorder is a molecule according to Formula (I): A-X—B—Y—C; in which A is a binding moiety, B is a polynucleotide, C is a polymer, X is a bond or first linker, and Y is a bond or second linker. In some instances, the polynucleotide comprises at least one 2′ modified nucleotide, at least one modified internucleotide linkage, or at least one inverted abasic moiety. In some instances, the molecule of Formula (I) further comprises D, an endosomolytic moiety.

[0157] In some embodiments, a molecule described herein is also used for inhibiting the expression of a target gene in a primary cell of a patient in need thereof. In such instances, a molecule for such use is a molecule according to Formula (I): A-X—B—Y—C; in which A is a binding moiety, B is a polynucleotide, C is a polymer, X is a bond or first linker, and Y is a bond or second linker. In some instances, the polynucleotide comprises at least one 2′ modified nucleotide, at least one modified internucleotide linkage, or at least one inverted abasic moiety. In some instances, the molecule of Formula (I) further comprises D, an endosomolytic moiety.

[0158] In some embodiments, a molecule described herein is additionally used as an immuno-oncology therapy for the treatment of a disease or disorder. In some instance, the molecule is a molecule according to Formula (I): A-X—B—Y—C; in which A is a binding moiety, B is a polynucleotide, C is a polymer, X is a bond or first linker, and Y is a bond or second linker. In some instances, the polynucleotide comprises at least one 2′ modified nucleotide, at least one modified internucleotide linkage, or at least one inverted abasic moiety. In some instances, the molecule of Formula (I) further comprises D, an endosomolytic moiety.

[0159] In additional embodiments, described herein include a kit, which comprises one or more of the molecules described herein.

### Therapeutic Molecule Platform

[0160] In some embodiments, a molecule (e.g., a therapeutic molecule) described herein comprises a binding moiety conjugated to a polynucleic acid molecule and a polymer. In some embodiments, a molecule (e.g., a therapeutic molecule) comprises a molecule according to Formula (I):

A-X—B—Y—C Formula I

wherein,
[0161] A is a binding moiety;
[0162] B is a polynucleotide;
[0163] C is a polymer;
[0164] X is a bond or first linker; and
[0165] Y is a bond or second linker; and
   wherein the polynucleotide comprises at least one 2′ modified nucleotide, at least one modified internucleotide linkage, or at least one inverted abasic moiety.

[0166] In some instances, the molecule of Formula (I) further comprises D, an endosomolytic moiety.

[0167] In some embodiments, at least one A and/or at least one C are conjugated to the 5′ terminus of B, the 3′ terminus of B, an internal site on B, or in any combinations thereof. In some instances, at least one A is conjugated at one terminus of B while at least one C is conjugated at the opposite terminus of B. In some instances, at least one of A is conjugated at one terminus of B while at least one of C is conjugated at an internal site on B.

[0168] In some cases, A and C are not conjugated or attached to B at the same terminus. In some cases, A is attached or conjugated to B at a first terminus of B. In some cases, C is attached or conjugated to B at a second terminus of B, and the second terminus of B is different than the first terminus. In some cases, A is attached or conjugated to B at the 5′ terminus of B, and C is attached or conjugated to B at the 3′ terminus of B. In other cases, A is attached or conjugated to B at the 3′ terminus of B, and C is attached or conjugated to B at the 5′ terminus of B.

[0169] In some embodiments, A is an antibody or binding fragment thereof. In some cases, C is a polymer. In some cases, A and C are not conjugated or attached to B at the same terminus. In some cases, A is attached or conjugated to B at a first terminus of B. In some cases, C is attached or conjugated to B at a second terminus of B, and the second terminus of B is different than the first terminus. In some cases, A is attached or conjugated to B at the 5′ terminus of B, and C is attached or conjugated to B at the 3′ terminus of B. In other cases, A is attached or conjugated to B at the 3′ terminus of B, and C is attached or conjugated to B at the 5′ terminus of B. In some cases, X which connects A to B is a bond or a non-polymeric linker. In some cases, X is a non-peptide linker (or a linker that does not comprise an amino acid residue). In some cases, Y which connects B to C is a bond or a second linker. In some instances, X connects A to the 5′ terminus of B, and Y connects C to the 3′ terminus of B. In other instances, X connects A to the 3′ terminus of B, and Y connects C to the 5′ terminus of B.

[0170] In some embodiments, X—B is conjugated or attached to the N-terminus, C-terminus, a constant region, a hinge region, or a Fc region of A. In some instances, X—B is conjugated or attached to the N-terminus of A. In some instances, X—B is conjugated or attached to the C-terminus of A. In some instances, X—B is conjugated or attached to a hinge region of A. In some instances, X—B is conjugated or attached to a constant region of A. In some instances, X—B is conjugated or attached to the Fc region of A.

[0171] In some instances, at least one B and/or at least one C, and optionally at least one D are conjugated to a first A. In some instances, the at least one B is conjugated at a terminus (e.g., a 5′ terminus or a 3′ terminus) to the first A or are conjugated via an internal site to the first A. In some cases, the at least one C is conjugated either directly to the first A or indirectly via the two or more Bs. If indirectly via the two or more Bs, the two or more Cs are conjugated either at the same terminus as the first A on B, at opposing terminus from the first A, or independently at an internal site. In some instances, at least one additional A is further conjugated to the first A, to B, or to C. In additional instances, the at least one D is optionally conjugated either directly or indirectly to the first A, to the at least one B, or to the at least one C. If directly to the first A, the at least one D is also optionally conjugated to the at least one B to form a A-D-B conjugate or is optionally conjugated to the at least one B and the at least one C to form a A-D-B—C conjugate. In some cases, the at least one additional A is different than the first A.

[0172] In some cases, two or more Bs and/or two or more Cs are conjugated to a first A. In some instances, the two or more Bs are conjugated at a terminus (e.g., a 5′ terminus or a 3′ terminus) to the first A or are conjugated via an internal site to the first A. In some instances, the two or more Cs are conjugated either directly to the first A or indirectly via the two or more Bs. If indirectly via the two or more Bs, the two or more Cs are conjugated either at the same terminus as the first A on B, at opposing terminus from the first A, or independently at an internal site. In some instances, at least one additional A is further conjugated to the first A, to two or more Bs, or to two or more Cs. In additional instances, at least one D is optionally conjugated either directly or indirectly to the first A, to the two or more Bs, or to the two or more Cs. If indirectly to the first A, the at least one D is conjugated to the first A through the two or more Bs, through the two or more Cs, through a B—C orientation to form a A-B—C-D type conjugate, or through a C—B orientation to form a A-C—B-D type conjugate. In some cases, the at least one additional A is different than the first A. In some cases, the two or more Bs are different. In other cases, the two or more Bs are the same. In some instances, the two or more Cs are different. In other instances, the two or more Cs are the same. In additional instances, the two or more Ds are different. In additional instances, the two or more Ds are the same.

[0173] In other cases, two or more Bs and/or two or more Ds, optionally two or more Cs are conjugated to a first A. In some instances, the two or more Bs are conjugated at a terminus (e.g., a 5′ terminus or a 3′ terminus) to the first A or are conjugated via an internal site to the first A. In some instances, the two or more Ds are conjugated either directly to the first A or indirectly via the two or more Bs. If indirectly via the two or more Bs, the two or more Ds are conjugated either at the same terminus as the first A on B, at opposing terminus from the first A, or independently at an internal site. In some instances, at least one additional A is further conjugated to the first A, to the two or more Bs, or to the two or more Ds. In additional instances, the two or more Cs are optionally conjugated either directly or indirectly to the first A, to the two or more Bs, or to the two or more Ds. In some cases, the at least one additional A is different than the first A. In some cases, the two or more Bs are different. In other cases, the two or more Bs are the same. In some instances, the two or more Cs are different. In other instances, the two or more Cs are the same. In additional instances, the two or more Ds are different. In additional instances, the two or more Ds are the same.

[0174] In some embodiments, a molecule (e.g., a therapeutic molecule) described herein comprises a molecule according to Formula (II):

(A-X—B—Y—C_{c})-L-D Formula II

wherein,
[0175] A is a binding moiety;
[0176] B is a polynucleotide;
[0177] C is a polymer;
[0178] X is a bond or first linker;
[0179] Y is a bond or second linker;
[0180] L is a bond or third linker;
[0181] D is an endosomolytic moiety; and
[0182] c is an integer between 0 and 1; and
   wherein the polynucleotide comprises at least one 2′ modified nucleotide, at least one modified internucleotide linkage, or at least one inverted abasic moiety; and D is conjugated anywhere on A, B, or C.

[0183] In some embodiments, a molecule (e.g., a therapeutic molecule) described herein comprises a molecule according to Formula (III):

Aₐ-X—B_{b}—Y—C_{c}-L-Dₙ Formula III

wherein,
[0184] A is a binding moiety;
[0185] B is a polynucleotide;
[0186] C is a polymer;
[0187] D is an endosomolytic moiety;
[0188] X is a bond or first linker;
[0189] Y is a bond or second linker;
[0190] L is a bond or third linker;
[0191] a and b are independently an integer between 1-3;
[0192] c is an integer between 0 and 3; and
[0193] n is an integer between 0 and 10; and
   wherein the polynucleotide comprises at least one 2′ modified nucleotide, at least one modified internucleotide linkage, or at least one inverted abasic moiety; A is conjugated anywhere on B, C, or D; B is conjugated anywhere on A, C, or D; C is conjugated anywhere on A, B, or D; and D is conjugated anywhere on A, B, or C.

[0194] In some embodiments, a molecule (e.g., a therapeutic molecule) described herein comprises a molecule according to Formula (IIIa): A-X—B-L-D-Y—C.

[0195] In some embodiments, a molecule (e.g., a therapeutic molecule) described herein comprises a molecule according to Formula (IIIb): Aₐ-X—B_{b}-L-Dₙ.

[0196] In some embodiments, a molecule (e.g., a therapeutic molecule) described herein comprises a molecule according to Formula (IV):

A-X—(B_{b}—Y—C_{c}-L-Dₙ)ₘ

wherein,
[0197] A is a binding moiety;
[0198] B is a polynucleotide;
[0199] C is a polymer;
[0200] D is an endosomolytic moiety;
[0201] X is a bond or first linker;
[0202] Y is a bond or second linker;
[0203] L is a bond or third linker;
[0204] a and b are independently an integer between 1-3;
[0205] c is an integer between 0 and 3;
[0206] n is an integer between 0 and 10; and
[0207] m is an integer between 1-3; and
   wherein the polynucleotide comprises at least one 2′ modified nucleotide, at least one modified internucleotide linkage, or at least one inverted abasic moiety; C is conjugated anywhere on B or D; and D is conjugated anywhere on B or C.

[0208] In some embodiments, a molecule (e.g., a therapeutic molecule) described herein comprises a molecule according to Formula (IVa): A-X—(B_{b}-L-Dₙ-Y—C_{c})ₘ.

[0209] In some embodiment, a molecule (e.g., a therapeutic molecule) described herein is a molecule as illustrated in FIG. 1. In some instances, a molecule (e.g., a therapeutic molecule) described herein is a molecule as illustrated in FIG. 1A. In some cases, a molecule (e.g., a therapeutic molecule) described herein is a molecule as illustrated in FIG. 1B. In additional cases, a molecule (e.g., a therapeutic molecule) described herein is a molecule as illustrated in FIG. 1C.

[0210] In some embodiments, a molecule (e.g., a therapeutic molecule) is a molecule as illustrated:

[chemical structure]

[0211] In some embodiments, a molecule (e.g., a therapeutic molecule) is a molecule as illustrated:

[chemical structure]

[0212] In some embodiments, a molecule (e.g., a therapeutic molecule) is a molecule as illustrated:

[chemical structure]

[0213] In some embodiments, a molecule (e.g., a therapeutic molecule) is a molecule as illustrated:

[chemical structure]

[0214] In some embodiments, a molecule (e.g., a therapeutic molecule) is a molecule as illustrated:

[chemical structure]

[0215] In some embodiments, a molecule (e.g., a therapeutic molecule) is a molecule as illustrated:

[chemical structure]

[0216] In some embodiments, a molecule (e.g., a therapeutic molecule) is a molecule as illustrated:

[chemical structure]

[0217] In some embodiments, a molecule (e.g., a therapeutic molecule) is a molecule as illustrated:

[chemical structure]

[0218] In some embodiments, a molecule (e.g., a therapeutic molecule) is a molecule as illustrated:

[chemical structure]

[0219] In some embodiments, a molecule (e.g., a therapeutic molecule) is a molecule as illustrated:

[chemical structure]

[0220] In some embodiments, a molecule (e.g., a therapeutic molecule) is a molecule as illustrated:

[chemical structure]

[0221] In some embodiments, a molecule (e.g., a therapeutic molecule) is a molecule as illustrated:

[chemical structure]

[0222] In some embodiments, a molecule (e.g., a therapeutic molecule) is a molecule as illustrated:

[chemical structure]

[0223] In some embodiments, a molecule (e.g., a therapeutic molecule) is a molecule as illustrated:

[chemical structure]

[0224] In some embodiments, a molecule (e.g., a therapeutic molecule) is a molecule as illustrated:

[chemical structure]

[0225] In some embodiments, a molecule (e.g., a therapeutic molecule) is a molecule as illustrated:

[chemical structure]

[0226] In some embodiments, a molecule (e.g., a therapeutic molecule) is a molecule as illustrated:

[chemical structure]

[0227] In some embodiments, a molecule (e.g., a therapeutic molecule) is a molecule as illustrated:

[chemical structure]

[0228] The [symbol] as illustrated above is for representation purposes only and encompasses a humanized antibody or binding fragment thereof, chimeric antibody or binding fragment thereof, monoclonal antibody or binding fragment thereof, monovalent Fab′, divalent Fab2, single-chain variable fragment (scFv), diabody, minibody, nanobody, single-domain antibody (sdAb), or camelid antibody or binding fragment thereof.

### Polynucleic Acid Molecule Targets

[0229] In some embodiments, the polynucleic acid molecule B is a polynucleic acid molecule (or polynucleotide) that hybridizes to a target region on an oncogene. In some instances, oncogenes are further classified into several categories: growth factors or mitogens, receptor tyrosine kinases, cytoplasmic tyrosine kinases, cytoplasmic serine/threonine kinases, regulatory GTPases, and transcription factors. Exemplary growth factors include c-Sis. Exemplary receptor tyrosine kinases include epidermal growth factor receptor (EGFR), platelet-derived growth factor receptor (PDGFR), vascular endothelial growth factor receptor (VEGFR), and HER2/neu. Exemplary cytoplasmic tyrosine kinases include Src-family tyrosine kinases, Syk-ZAP-70 family of tyrosine kinases, BTK family of tyrosine kinases, and Abl gene in CML. Exemplary cytoplasmic serine/threonine kinases include Raf kinase and cyclin-dependent kinases. Exemplary regulatory GTPases include Ras family of proteins such as KRAS. Exemplary transcription factors include MYC gene. In some instances, an oncogene described herein comprises an oncogene selected from growth factors or mitogens, receptor tyrosine kinases, cytoplasmic tyrosine kinases, cytoplasmic serine/threonine kinases, regulatory GTPases, or transcription factors. In some embodiments, the polynucleic acid molecule is a polynucleic acid molecule that hybridizes to a target region of an oncogene selected from growth factors or mitogens, receptor tyrosine kinases, cytoplasmic tyrosine kinases, cytoplasmic serine/threonine kinases, regulatory GTPases, or transcription factors.

[0230] In some embodiments, an oncogene described herein comprises Ab1, AKT-2, ALK, AML1 (or RUNX1), AR, AXL, BCL-2, 3, 6, BRAF, c-MYC, EGFR, ErbB-2 (Her2, Neu), Fms, FOS, GLI1, HPRT1, IL-3, INTS2, JUN, KIT, KS3, K-sam, LBC (AKAP13), LCK, LMO1, LMO2, LYL1, MAS1, MDM2, MET, MLL (KMT2A), MOS, MYB, MYH11/CBFB, NOTCH1 (TAN1), NTRK1 (TRK), OST (SLC51B), PAX5, PIM1, PRAD-1, RAF, RAR/PML, HRAS, KRAS, NRAS, REL/NRG, RET, ROS, SKI, SRC, TIAM1, or TSC2. In some embodiments, the polynucleic acid molecule is a polynucleic acid molecule that hybridizes to a target region of Ab1, AKT-2, ALK, AML1 (or RUNX1), AR, AXL, BCL-2, 3, 6, BRAF, c-MYC, EGFR, ErbB-2 (Her2, Neu), Fms, FOS, GLI1, HPRT1, IL-3, INTS2, JUN, KIT, KS3, K-sam, LBC (AKAP13), LCK, LMO1, LMO2, LYL1, MAS1, MDM2, MET, MLL (KMT2A), MOS, MYB, MYH11/CBFB, NOTCH1 (TAN1), NTRK1 (TRK), OST (SLC51B), PAX5, PIM1, PRAD-1, RAF, RAR PML, HRAS, KRAS, NRAS, REL/NRG, RET, ROS, SKI, SRC, TIAM1, or TSC2.

[0231] In some embodiments, an oncogene described herein comprises KRAS, EGFR, AR, HPRT1, CNNTB1 (β-catenin), or β-catenin associated genes. In some embodiments, the polynucleic acid molecule B is a polynucleic acid molecule that hybridizes to a target region of KRAS, EGFR, AR, HPRT1, CNNTB1 (β-catenin), or β-catenin associated genes. In some embodiments, the polynucleic acid molecule B is a polynucleic acid molecule that hybridizes to a target region of KRAS. In some embodiments, the polynucleic acid molecule B is a polynucleic acid molecule that hybridizes to a target region of EGFR. In some embodiments, the polynucleic acid molecule B is a polynucleic acid molecule that hybridizes to a target region of AR. In some embodiments, the polynucleic acid molecule B is a polynucleic acid molecule that hybridizes to a target region of CNNTB1 (β-catenin). In some embodiments, the polynucleic acid molecule B is a polynucleic acid molecule that hybridizes to a target region of CNNTB1 (β-catenin) associated genes. In some instances, the β-catenin associated genes comprise PIK3CA, PIK3CB, and Myc. In some instances, the polynucleic acid molecule B is a polynucleic acid molecule that hybridizes to a target region of HPRT1.

Polynucleic Acid Molecules that Target Kirsten Rat Sarcoma Viral Oncogene Homolog (KRAS)

[0232] Kirsten Rat Sarcoma Viral Oncogene Homolog (also known as GTPase KRas, V-Ki-ras2 Kirsten rat sarcoma viral oncogene homolog, or KRAS) is involved in regulating cell division. The K-Ras protein is a GTPase belonging to the Ras superfamily. In some instances, K-Ras modulates cell cycle progression, as well as induces growth arrest, apoptosis, and replicative senescence under different environmental triggers (e.g., cellular stress, ultraviolet, heat shock, or ionizing irradiation). In some cases, wild type KRAS gene has been shown to be frequently lost during tumor progression in different types of cancer, while mutations of KRAS gene have been linked to cancer development. In some instances, KRAS amplification has also been implicated in cancer development (see, for example, Valtorta et al. “KRAS gene amplification in colorectal cancer and impact on response to EGFR-targeted therapy,” Int. J. Cancer 133: 1259-1266 (2013)). In such cases, the cancer pertains to a refractory cancer in which the patient has acquired resistance to a particular inhibitor or class of inhibitors.

[0233] In some embodiments, the KRAS gene is wild type or comprises a mutation. In some instances, KRAS mRNA is wild type or comprises a mutation. In some instances, the polynucleic acid molecule is a polynucleic acid molecule that hybridizes to a target region of wild type KRAS DNA or RNA. In some instances, the polynucleic acid molecule is a polynucleic acid molecule that hybridizes to a target region of KRAS DNA or RNA comprising a mutation (e.g., a substitution, a deletion, or an addition).

[0234] In some embodiments, KRAS DNA or RNA comprises one or more mutations. In some embodiments, KRAS DNA or RNA comprises one or more mutations at codons 12 or 13 in exon 1. In some instances, KRAS DNA or RNA comprises one or more mutations at codons 61, 63, 117, 119, or 146. In some instances, KRAS DNA or RNA comprises one or more mutations at positions corresponding to amino acid residues 12, 13, 18, 19, 20, 22, 24, 26, 36, 59, 61, 63, 64, 68, 110, 116, 117, 119, 146, 147, 158, 164, 176, or a combination thereof of the KRAS polypeptide. In some embodiments, KRAS DNA or RNA comprises one or more mutations at positions corresponding to amino acid residues selected from G12V, G12D, G12C, G12A, G12S, G12F, G13C, G13D, G13V, A18D, L19F, T20R, Q22K, I24N, N26K, I36L, I36M, A59G, A59E, Q61K, Q61H, Q61L, Q61R, E63K, Y64D, Y64N, R68S, P110S, K117N, C118S, A146T, A146P, A146V, K147N, T158A, R164Q, K176Q, or a combination thereof of the KRAS polypeptide.

[0235] In some embodiments, the polynucleic acid molecule hybridizes to a target region of KRAS DNA or RNA comprising one or more mutations. In some embodiments, the polynucleic acid molecule hybridizes to a target region of KRAS DNA or RNA comprising one or more mutations at codons 12 or 13 in exon 1. In some embodiments, the polynucleic acid molecule hybridizes to a target region of KRAS DNA or RNA comprising one or more mutations at codons 61, 63, 117, 119, or 146. In some embodiments, the polynucleic acid molecule hybridizes to a target region of KRAS DNA or RNA comprising one or more mutations at positions corresponding to amino acid residues 12, 13, 18, 19, 20, 22, 24, 26, 36, 59, 61, 63, 64, 68, 110, 116, 117, 119, 146, 147, 158, 164, 176, or a combination thereof of the KRAS polypeptide. In some embodiments, the polynucleic acid molecule hybridizes to a target region of KRAS DNA or RNA comprising one or more mutations corresponding to amino acid residues selected from G12V, G12D, G12C, G12A, G12S, G12F, G13C, G13D, G13V, A18D, L19F, T20R, Q22K, I24N, N26K, I36L, I36M, A59G, A59E, Q61K, Q61H, Q61L, Q61R, E63K, Y64D, Y64N, R68S, P110S, K117N, C118S, A146T, A146P, A146V, K147N, T158A, R164Q, K176Q, or a combination thereof of the KRAS polypeptide.

Polynucleic Acid Molecules that Target Epidermal Growth Factor Receptor (EGFR)

[0236] Epidermal growth factor receptor (EGFR, ErbB-1, or HER1) is a transmembrane tyrosine kinase receptor and a member of the ErbB family of receptors, which also include HER2/c-neu (ErbB-2), Her3 (ErbB-3) and Her4 (ErbB-4). In some instances, EGFR mutations drive the downstream activation of RAS/RAF/MAPK, PI3K/AKT, and/or JAK/STAT pathways, leading to mitosis, cell proliferation, and suppression of apoptosis. In addition, amplification of wild-type EGFR gene has been implicated in the development of cancers such as glioblastomas and non-small cell lung cancer (Talasila, et al., “EGFR Wild-type Amplification and Activation Promote Invasion and Development of Glioblastoma Independent of Angiogenesis,” Acta Neuropathol. 125(5): 683-698 (2013); Bell et al., “Epidermal Growth Factor Receptor Mutations and Gene Amplification in Non-Small-Cell Lung Cancer: Molecular Analysis of the IDEAL/INTACT Gefitinib Trials,” J. Clinical Oncology 23(31): 8081-8092 (2005)).

[0237] In some embodiments, EGFR DNA or RNA is wild type EGFR or EGFR comprising a mutation. In some instances, EGFR is wild type EGFR. In some instances, EGFR DNA or RNA comprises a mutation. In some instances, the polynucleic acid molecule hybridizes to a target region of wild type EGFR DNA or RNA. In some instances, the polynucleic acid molecule hybridizes to a target region of EGFR DNA or RNA comprising a mutation (e.g., a substitution, a deletion, or an addition).

[0238] In some instances, EGFR DNA or RNA comprises one or more mutations. In some embodiments, EGFR DNA or RNA comprises one or more mutations within one or more exons. In some instances, the one or more exons comprise exon 18, exon 19, exon 20, exon 21 or exon 22. In some instances, EGFR DNA or RNA comprises one or more mutations in exon 18, exon 19, exon 20, exon 21, exon 22 or a combination thereof.

[0239] In some instances, EGFR DNA or RNA comprises one or more mutations at positions corresponding to amino acid residues 34, 38, 45, 62, 63, 77, 78, 108, 114, 120, 140, 148, 149, 160, 177, 178, 189, 191, 198, 220, 222, 223, 229, 237, 240, 244, 252, 254, 255, 256, 263, 270, 273, 276, 282, 288, 289, 301, 303, 304, 309, 314, 326, 331, 354, 363, 373, 337, 380, 384, 393, 427, 428, 437, 441, 447, 465, 475, 515, 526, 527, 531, 536, 541, 546, 571, 588, 589, 596, 596, 598, 602, 614, 620, 628, 636, 641, 645, 651, 671, 689, 694, 700, 709, 712, 714, 715, 716, 719, 720, 721, 731, 733, 739-744, 742, 746-750, 746-752, 746, 747, 747-749, 747-751, 747-753, 751, 752, 754, 752-759, 750, 761-762, 761, 763, 765, 767-768, 767-769, 768, 769, 769-770, 770-771, 772, 773-774, 773, 774, 774-775, 776, 779, 783, 784, 786, 790, 792, 794, 798, 803, 805, 807, 810, 826, 827, 831, 832, 833, 835, 837, 838, 839, 842, 843, 847, 850, 851, 853, 854, 856, 858, 861, 863, 894, 917, 967, 1006, 1019, 1042, 1100, 1129, 1141, 1153, 1164, 1167, or a combination thereof of the EGFR polypeptide. In some embodiments, EGFR DNA or RNA comprises one or more mutations at positions corresponding to amino acid residues 747, 761, 790, 854, 858, or a combination thereof of the EGFR polypeptide. In some embodiments, EGFR DNA or RNA comprises one or more mutations at positions corresponding to amino acid residues 761, 790, 858, or a combination thereof of the EGFR polypeptide. In some embodiments, EGFR DNA or RNA comprises a mutation at a position corresponding to amino acid residue 747 of the EGFR polypeptide. In some embodiments, EGFR DNA or RNA comprises a mutation at a position corresponding to amino acid residue 761 of the EGFR polypeptide. In some embodiments, EGFR DNA or RNA comprises a mutation at a position corresponding to amino acid residue 790 of the EGFR polypeptide. In some embodiments, EGFR DNA or RNA comprises a mutation at a position corresponding to amino acid residue 854 of the EGFR polypeptide. In some embodiments, EGFR DNA or RNA comprises a mutation at a position corresponding to amino acid residue 858 of the EGFR polypeptide.

[0240] In some embodiments, EGFR DNA or RNA comprises one or more mutations selected from T34M, L38V, E45Q, L62R, G63R, G63K, S77F, F78L, R108K, R108G, E114K, A120P, L140V, V148M, R149W, E160K, S177P, M178I, K189T, D191N, S198R, S220P, R222L, R222C, S223Y, S229C, A237Y, C240Y, R244G, R252C, R252P, F2541, R255 (nonsense mutation), D256Y, T263P, Y270C, T273A, Q276 (nonsense), E282K, G288 (frame shift), A289D, A289V, A289T, A289N, A289D, V301 (deletion), D303H, H304Y, R309Q, D314N, C326R, G331R, T354M, T363I, P373Q, R337S, S380 (frame shift), T384S, D393Y, R427L, G428S, S437Y, V441I, S447Y, G465R, I475V, C515S, C526S, R527L, R531 (nonsense), V536M, L541I, P546Q, C571S, G588S, P589L, P596L, P596S, P596R, P596L, G598V, G598A, E602G, G614D, C620Y, C620W, C628Y, C628F, C636Y, T638M, P641H, S645C, V651M, R671C, V689M, P694S, N700D, E709A, E709K, E709Q, E709K, F712L, K714N, I715S, K716R, G719A, G719C, G719D, G719S, S720C, S720F, G721V, W731Stop, P733L, K739-I744 (insertion), V742I, V742A, E746-A750 (deletion), E746K, L747S, L747-E749 (deletion), L747-T751 (deletion), L747-P753 (deletion), G746-S752 (deletion), T751I, S752Y, K754 (deletion), S752-1759 (deletion), A750P, D761-E762 (e.g., residues EAFQ insertion (SEQ ID NO: 2110)), D761N, D761Y, A763V, V765A, A767-S768 (e.g., residues TLA insertion), A767-V769 (e.g., residues ASV insertion), S7681, S768T, V769L, V769M, V769-D770 (e.g., residue Y insertion), 770-771 (e.g., residues GL insertion), 770-771 (e.g., residue G insertion), 770-771 (e.g., residues CV insertion), 770-771 (e.g., residues SVD insertion), P772R, 773-774 (e.g., residues NPH insertion), H773R, H773L, V774M, 774-775 (e.g., residues HV insertion), R776H, R776C, G779F, T783A, T784F, T854A, V786L, T790M, L792P, P794H, L798F, R803W, H805R, D807H, G810S, N826S, Y827 (nonsense), R831H, R832C, R832H, L833F, L833V, H835L, D837V, L838M, L838P, A839V, N842H, V843L, T847K, T847I, H850N, V851A, I853T, F856L, L858R, L858M, L861Q, L861R, G863D, Q894L, G917A, E967A, D1006Y, P1019L, S1042N, R1100S, H1129Y, T1141S, S1153I, Q1164R, L1167M, or a combination thereof of the EGFR polypeptide.

[0241] In some instances, the polynucleic acid molecule hybridizes to a target region of EGFR DNA or RNA comprising one or more mutations. In some embodiments, the polynucleic acid molecule hybridizes to a target region of EGFR DNA or RNA comprising one or more mutations in exon 18, exon 19, exon 20, exon 21, exon 22 or a combination thereof.

[0242] In some embodiments, the polynucleic acid molecule hybridizes to a target region of EGFR DNA or RNA comprising one or more mutations at positions corresponding to amino acid residues 34, 38, 45, 62, 63, 77, 78, 108, 114, 120, 140, 148, 149, 160, 177, 178, 189, 191, 198, 220, 222, 223, 229, 237, 240, 244, 252, 254, 255, 256, 263, 270, 273, 276, 282, 288, 289, 301, 303, 304, 309, 314, 326, 331, 354, 363, 373, 337, 380, 384, 393, 427, 428, 437, 441, 447, 465, 475, 515, 526, 527, 531, 536, 541, 546, 571, 588, 589, 596, 596, 598, 602, 614, 620, 628, 636, 641, 645, 651, 671, 689, 694, 700, 709, 712, 714, 715, 716, 719, 720, 721, 731, 733, 739-744, 742, 746-750, 746-752, 746, 747, 747-749, 747-751, 747-753, 751, 752, 754, 752-759, 750, 761-762, 761, 763, 765, 767-768, 767-769, 768, 769, 769-770, 770-771, 772, 773-774, 773, 774, 774-775, 776, 779, 783, 784, 786, 790, 792, 794, 798, 803, 805, 807, 810, 826, 827, 831, 832, 833, 835, 837, 838, 839, 842, 843, 847, 850, 851, 853, 854, 856, 858, 861, 863, 894, 917, 967, 1006, 1019, 1042, 1100, 1129, 1141, 1153, 1164, 1167, or a combination thereof of the EGFR polypeptide. In some embodiments, the polynucleic acid molecule hybridizes to a target region of EGFR DNA or RNA comprising one or more mutations at positions corresponding to amino acid residues 747, 761, 790, 854, 858, or a combination thereof of the EGFR polypeptide. In some embodiments, the polynucleic acid molecule hybridizes to a target region of EGFR DNA or RNA comprising one or more mutations at positions corresponding to amino acid residues 761, 790, 858, or a combination thereof of the EGFR polypeptide. In some embodiments, the polynucleic acid molecule hybridizes to a target region of EGFR DNA or RNA comprising a mutation at a position corresponding to amino acid residue 747 of the EGFR polypeptide. In some embodiments, the polynucleic acid molecule hybridizes to a target region of EGFR DNA or RNA comprising a mutation at a position corresponding to amino acid residue 761 of the EGFR polypeptide. In some embodiments, the polynucleic acid molecule hybridizes to a target region of EGFR DNA or RNA comprising a mutation at a position corresponding to amino acid residue 790 of the EGFR polypeptide. In some embodiments, the polynucleic acid molecule hybridizes to a target region of EGFR DNA or RNA comprising a mutation at a position corresponding to amino acid residue 854 of the EGFR polypeptide. In some embodiments, the polynucleic acid molecule hybridizes to a target region of EGFR DNA or RNA comprising a mutation at a position corresponding to amino acid residue 858 of the EGFR polypeptide.

[0243] In some embodiments, the polynucleic acid molecule hybridizes to a target region of EGFR DNA or RNA comprising one or more mutations selected from T34M, L38V, E45Q, L62R, G63R, G63K, S77F, F78L, R108K, R108G, E114K, A120P, L140V, V148M, R149W, E160K, S177P, M178I, K189T, D191N, S198R, S220P, R222L, R222C, S223Y, S229C, A237Y, C240Y, R244G, R252C, R252P, F2541, R255 (nonsense mutation), D256Y, T263P, Y270C, T273A, Q276 (nonsense), E282K, G288 (frame shift), A289D, A289V, A289T, A289N, A289D, V301 (deletion), D303H, H304Y, R309Q, D314N, C326R, G331R, T354M, T363I, P373Q, R337S, S380 (frame shift), T384S, D393Y, R427L, G428S, S437Y, V441I, S447Y, G465R, 1475V, C515S, C526S, R527L, R531 (nonsense), V536M, L541I, P546Q, C571S, G588S, P589L, P596L, P596S, P596R, P596L, G598V, G598A, E602G, G614D, C620Y, C620W, C628Y, C628F, C636Y, T638M, P641H, S645C, V651M, R671C, V689M, P694S, N700D, E709A, E709K, E709Q, E709K, F712L, K714N, 1715S, K716R, G719A, G719C, G719D, G719S, S720C, S720F, G721V, W731Stop, P733L, K739-I744 (insertion), V742I, V742A, E746-A750 (deletion), E746K, L747S, L747-E749 (deletion), L747-T751 (deletion), L747-P753 (deletion), G746-S752 (deletion), T751I, S752Y, K754 (deletion), S752-1759 (deletion), A750P, D761-E762 (e.g., residues EAFQ insertion (SEQ ID NO: 2110)), D761N, D761Y, A763V, V765A, A767-S768 (e.g., residues TLA insertion), A767-V769 (e.g., residues ASV insertion), S7681, S768T, V769L, V769M, V769-D770 (e.g., residue Y insertion), 770-771 (e.g., residues GL insertion), 770-771 (e.g., residue G insertion), 770-771 (e.g., residues CV insertion), 770-771 (e.g., residues SVD insertion), P772R, 773-774 (e.g., residues NPH insertion), H773R, H773L, V774M, 774-775 (e.g., residues HV insertion), R776H, R776C, G779F, T783A, T784F, T854A, V786L, T790M, L792P, P794H, L798F, R803W, H805R, D807H, G810S, N826S, Y827 (nonsense), R831H, R832C, R832H, L833F, L833V, H835L, D837V, L838M, L838P, A839V, N842H, V843L, T847K, T847I, H850N, V851A, 1853T, F856L, L858R, L858M, L861Q, L861R, G863D, Q894L, G917A, E967A, D1006Y, P1019L, S1042N, R1100S, H1129Y, T1141S, S1153I, Q1164R, L1167M, or a combination thereof of the EGFR polypeptide. In some embodiments, the polynucleic acid molecule hybridizes to a target region of EGFR DNA or RNA comprising one or more mutations selected from L747S, D761Y, T790M, T854A, L858R, or a combination thereof of the EGFR polypeptide. In some embodiments, the polynucleic acid molecule hybridizes to a target region of EGFR DNA or RNA comprising one or more mutations selected from D761Y, T790M, L858R, or a combination thereof of the EGFR polypeptide. In some embodiments, the polynucleic acid molecule hybridizes to a target region of EGFR DNA or RNA comprising mutation L747S of the EGFR polypeptide. In some embodiments, the polynucleic acid molecule hybridizes to a target region of EGFR DNA or RNA comprising mutation D761Y of the EGFR polypeptide. In some embodiments, the polynucleic acid molecule hybridizes to a target region of EGFR DNA or RNA comprising mutation T790M of the EGFR polypeptide. In some embodiments, the polynucleic acid molecule hybridizes to a target region of EGFR DNA or RNA comprising mutation T854A of the EGFR polypeptide. In some embodiments, the polynucleic acid molecule hybridizes to a target region of EGFR DNA or RNA comprising mutation L858R of the EGFR polypeptide.

Polynucleic Acid Molecules that Target Androgen Receptor (AR)

[0244] Androgen receptor (AR) (also known as NR3C4, nuclear receptor subfamily 3, group C, gene 4) belongs to the steroid hormone group of nuclear receptor superfamily along with related members: estrogen receptor (ER), glucocorticoid receptor (GR), progesterone receptor (PR), and mineralocorticoid receptor (MR). Androgens, or steroid hormones, modulate protein synthesis and tissue remodeling through the androgen receptor. The AR protein is a ligand-inducible zinc finger transcription factor that regulates target gene expression. The presence of mutations in the AR gene has been observed in several types of cancers (e.g., prostate cancer, breast cancer, bladder cancer, or esophageal cancer), and in some instances, has been linked to metastatic progression.

[0245] In some embodiments, AR DNA or RNA is wild type or comprises one or more mutations and/or splice variants. In some instances, AR DNA or RNA comprises one or more mutations. In some instances, AR DNA or RNA comprises one or more splice variants selected from AR splice variants including but not limited to AR1/2/2b, ARV2, ARV3, ARV4, AR1/2/3/2b, ARV5, ARV6, ARV7, ARV9, ARV10, ARV11, ARV12, ARV13, ARV14, ARV15, ARV16, and ARV(v567es). In some instances, the polynucleic acid molecule hybridizes to a target region of AR DNA or RNA comprising a mutation (e.g., a substitution, a deletion, or an addition) or a splice variant.

[0246] In some embodiments, AR DNA or RNA comprises one or more mutations. In some embodiments, AR DNA or RNA comprises one or more mutations within one or more exons. In some instances, the one or more exons comprise exon 1, exon 2, exon 3, exon 4, exon 5, exon 6, exon 7, or exon 8. In some embodiments, AR DNA or RNA comprises one or more mutations within exon 1, exon 2, exon 3, exon 4, exon 5, exon 6, exon 7, exon 8 or a combination thereof. In some instances, AR DNA or RNA comprises one or more mutations at positions corresponding to amino acid residues 2, 14, 16, 29, 45, 54, 57, 64, 106, 112, 176, 180, 184, 194, 198, 204, 214, 221, 222, 233, 243, 252, 255, 266, 269, 287, 288, 334, 335, 340, 363, 368, 369, 390, 403, 443, 491, 505, 513, 524, 524, 528, 533, 547, 548, 564, 567, 568, 574, 547, 559, 568, 571, 573, 575, 576, 577, 578, 579, 580, 581, 582, 585, 586, 587, 596, 597, 599, 601, 604, 607, 608, 609, 610, 611, 615, 616, 617, 619, 622, 629, 630, 638, 645, 647, 653, 662, 664, 670, 671, 672, 674, 677, 681, 682, 683, 684, 687, 688, 689, 690, 695, 700, 701, 702, 703, 705, 706, 707, 708, 710, 711, 712, 715, 717, 720, 721, 722, 723, 724, 725, 726, 727, 728, 730, 732, 733, 737, 739, 741, 742, 743, 744, 745, 746, 748, 749, 750, 751, 752, 754, 755, 756, 757, 758, 759, 762, 763, 764, 765, 766, 767, 768, 771, 772, 774, 777, 779, 786, 795, 780, 782, 784, 787, 788, 790, 791, 793, 794, 798, 802, 803, 804, 806, 807, 812, 813, 814, 819, 820, 821, 824, 827, 828, 830, 831, 834, 840, 841, 842, 846, 854, 855, 856, 863, 864, 866, 869, 870, 871, 874, 875, 877, 879, 880, 881, 886, 888, 889, 891, 892, 895, 896, 897, 898, 902, 903, 904, 907, 909, 910, 911, 913, 916, 919, or a combination thereof of the AR polypeptide. In some embodiments, AR DNA or RNA comprises one or more mutations at positions corresponding to amino acid residues selected from E2K, P14Q, K16N, V29M, S45T, L54S, L57Q, Q64R, Y106C, Q112H, S176S, K180R, L184P, Q194R, E198G, G204S, G214R, K221N, N222D, D233K, S243L, A252V, L255P, M266T, P269S, A287D, E288K, S334P, S335T, P340L, Y363N, L368V, A369P, P390R, P390S, P390L, A403V, Q443R, G491S, G505D, P513S, G524D, G524S, D528G, P533S, L547F, P548S, D564Y, S567F, G568W, L574P, L547F, C559Y, G568W, G568V, Y571C, Y571H, A573D, T575A, C576R, C576F, G577R, S578T, C579Y, C579F, K580R, V581F, F582Y, F582S, R585K, A586V, A587S, A596T, A596S, S597G, S597I, N599Y, C601F, D604Y, R607Q, R608K, K609N, D610T, C611Y, R615H, R615P, R615G, R616C, L616R, L616P, R617P, C619Y, A622V, R629W, R629Q, K630T, L638M, A645D, S647N, E653K, S662 (nonsense), I664N, Q670L, Q670R, P671H, I672T, L674P, L677P, E681L, P682T, G683A, V684I, V684A, A687V, G688Q, H689P, D690V, D695N, D695V, D695H, L700M, L701P, L701I, H701H, S702A, S703G, N705S, N705Y, E706 (nonsense), L707R, G708A, R710T, Q711E, L712F, V715M, K717Q, K720E, A721T, L722F, P723S, G724S, G724D, G724N, F725L, R726L, N727K, L728S, L728I, V730M, D732N, D732Y, D732E, Q733H, I737T, Y739D, W741R, M742V, M742I, G743R, G743V, L744F, M745T, V746M, A748D, A748V, A748T, M749V, M749I, G750S, G750D, W751R, R752Q, F754V, F754L, T755A, N756S, N756D, V757A, N758T, S759F, S759P, L762F, Y763H, Y763C, F764L, A765T, A765V, P766A, P766S, D767E, L768P, L768M, N771H, E772G, E772A, R774H, R774C, K777T, R779W, R786Q, G795V, M780I, S782N, C784Y, M787V, R788S, L790F, S791P, E793D, F794S, Q798E, Q802R, G803L, F804L, C806Y, M807V, M807R, M807I, L812P, F813V, S814N, N819Q, G820A, L821V, Q824L, Q824R, F827L, F827V, D828H, L830V, L830P, R831Q, R831L, Y834C, R840C, R840H, I841S, I842T, R846G, R854K, R855C, R855H, F856L, L863R, D864N, D864E, D864G, V866L, V866M, V866E, I869M, A870G, A870V, R871G, H874Y, H874R, Q875K, T877S, T877A, D879T, D879G, L880Q, L881V, M886V, S888L, V889M, F891L, P892L, M895T, A896T, E897D, I898T, Q902R, V903M, P904S, P904H, L907F, G909R, G909E, K910R, V911L, P913S, F916L, Q919R, or a combination thereof of the AR polypeptide.

[0247] In some embodiments, the polynucleic acid molecule hybridizes to a target region of AR DNA or RNA comprising one or more mutations. In some embodiments the polynucleic acid hybridizes to one or more AR splice variants. In some embodiments the polynucleic acid hybridizes to AR DNA or RNA comprising one or more AR splice variants including but not limited to AR1/2/2b, ARV2, ARV3, ARV4, AR1/2/3/2b, ARV5, ARV6, ARV7, ARV9, ARV10, ARV11, ARV12, ARV13, ARV14, ARV15, ARV16, and ARV(v567es). In some embodiments, the polynucleic acid molecule hybridizes to a target region of AR DNA or RNA comprising one or more mutations within exon 1, exon 2, exon 3, exon 4, exon 5, exon 6, exon 7, exon 8 or a combination thereof. In some embodiments, the polynucleic acid molecule hybridizes to a target region of AR DNA or RNA comprising one or more mutations at positions corresponding to amino acid residues 2, 14, 16, 29, 45, 54, 57, 64, 106, 112, 176, 180, 184, 194, 198, 204, 214, 221, 222, 233, 243, 252, 255, 266, 269, 287, 288, 334, 335, 340, 363, 368, 369, 390, 403, 443, 491, 505, 513, 524, 524, 528, 533, 547, 548, 564, 567, 568, 574, 547, 559, 568, 571, 573, 575, 576, 577, 578, 579, 580, 581, 582, 585, 586, 587, 596, 597, 599, 601, 604, 607, 608, 609, 610, 611, 615, 616, 617, 619, 622, 629, 630, 638, 645, 647, 653, 662, 664, 670, 671, 672, 674, 677, 681, 682, 683, 684, 687, 688, 689, 690, 695, 700, 701, 702, 703, 705, 706, 707, 708, 710, 711, 712, 715, 717, 720, 721, 722, 723, 724, 725, 726, 727, 728, 730, 732, 733, 737, 739, 741, 742, 743, 744, 745, 746, 748, 749, 750, 751, 752, 754, 755, 756, 757, 758, 759, 762, 763, 764, 765, 766, 767, 768, 771, 772, 774, 777, 779, 786, 795, 780, 782, 784, 787, 788, 790, 791, 793, 794, 798, 802, 803, 804, 806, 807, 812, 813, 814, 819, 820, 821, 824, 827, 828, 830, 831, 834, 840, 841, 842, 846, 854, 855, 856, 863, 864, 866, 869, 870, 871, 874, 875, 877, 879, 880, 881, 886, 888, 889, 891, 892, 895, 896, 897, 898, 902, 903, 904, 907, 909, 910, 911, 913, 916, 919, or a combination thereof of the AR polypeptide. In some embodiments, the polynucleic acid molecule hybridizes to a target region of AR DNA or RNA comprising one or more mutations selected from E2K, P14Q, K16N, V29M, S45T, L54S, L57Q, Q64R, Y106C, Q112H, S176S, K180R, L184P, Q194R, E198G, G204S, G214R, K221N, N222D, D233K, S243L, A252V, L255P, M266T, P269S, A287D, E288K, S334P, S335T, P340L, Y363N, L368V, A369P, P390R, P390S, P390L, A403V, Q443R, G491S, G505D, P513S, G524D, G524S, D528G, P533S, L547F, P548S, D564Y, S567F, G568W, L574P, L547F, C559Y, G568W, G568V, Y571C, Y571H, A573D, T575A, C576R, C576F, G577R, S578T, C579Y, C579F, K580R, V581F, F582Y, F582S, R585K, A586V, A587S, A596T, A596S, S597G, S597I, N599Y, C601F, D604Y, R607Q, R608K, K609N, D610T, C611Y, R615H, R615P, R615G, R616C, L616R, L616P, R617P, C619Y, A622V, R629W, R629Q, K630T, L638M, A645D, S647N, E653K, S662 (nonsense), I664N, Q670L, Q670R, P671H, I672T, L674P, L677P, E681L, P682T, G683A, V684I, V684A, A687V, G688Q, H689P, D690V, D695N, D695V, D695H, L700M, L701P, L701I, H701H, S702A, S703G, N705S, N705Y, E706 (nonsense), L707R, G708A, R710T, Q711E, L712F, V715M, K717Q, K720E, A721T, L722F, P723S, G724S, G724D, G724N, F725L, R726L, N727K, L728S, L728I, V730M, D732N, D732Y, D732E, Q733H, I737T, Y739D, W741R, M742V, M742I, G743R, G743V, L744F, M745T, V746M, A748D, A748V, A748T, M749V, M749I, G750S, G750D, W751R, R752Q, F754V, F754L, T755A, N756S, N756D, V757A, N758T, S759F, S759P, L762F, Y763H, Y763C, F764L, A765T, A765V, P766A, P766S, D767E, L768P, L768M, N771H, E772G, E772A, R774H, R774C, K777T, R779W, R786Q, G795V, M780I, S782N, C784Y, M787V, R788S, L790F, S791P, E793D, F794S, Q798E, Q802R, G803L, F804L, C806Y, M807V, M807R, M807I, L812P, F813V, S814N, N819Q, G820A, L821V, Q824L, Q824R, F827L, F827V, D828H, L830V, L830P, R831Q, R831L, Y834C, R840C, R840H, I841S, I842T, R846G, R854K, R855C, R855H, F856L, L863R, D864N, D864E, D864G, V866L, V866M, V866E, I869M, A870G, A870V, R871G, H874Y, H874R, Q875K, T877S, T877A, D879T, D879G, L880Q, L881V, M886V, S888L, V889M, F891L, P892L, M895T, A896T, E897D, I898T, Q902R, V903M, P904S, P904H, L907F, G909R, G909E, K910R, V911L, P913S, F916L, Q919R, or a combination thereof of the AR polypeptide.

Polynucleic Acid Molecules that Target B-Catenin and B-Catenin-Associated Genes

[0248] Catenin beta-1 (also known as CTNNB1, β-catenin, or beta-catenin) is a member of the catenin protein family. In humans, it is encoded by the CTNNB1 gene and is known for its dual functions—cell-cell adhesion and gene transcription. Beta-catenin is an integral structural component of cadherin-based adherens junctions and regulates cell growth and adhesion between cells and anchors the actin cytoskeleton. In some instance, beta-catenin is responsible for transmitting the contact inhibition signal that causes the cells to stop dividing once the epithelial sheet is complete. Beta-catenin is also a key nuclear effector of the Wnt signaling pathway. In some instances, imbalance in the structural and signaling properties of beta-catenin results in diseases and deregulated growth connected to malignancies such as cancer. For example, overexpression of beta-catenin has been linked to cancers such as gastric cancer (Suriano, et al., “Beta-catenin (CTNNB1) gene amplification: a new mechanism of protein overexpression in cancer,” Genes Chromosomes Cancer 42(3): 238-246 (2005)). In some cases, mutations in CTNNB1 gene have been linked to cancer development (e.g., colon cancer, melanoma, hepatocellular carcinoma, ovarian cancer, endometrial cancer, medulloblastoma pilomatricomas, or prostrate cancer), and in some instances, has been linked to metastatic progression. In additional cases, mutations in the CTNNB1 gene cause beta-catenin to translocate to the nucleus without any external stimulus and drive the transcription of its target genes continuously. In some cases, the potential of beta-catenin to change the previously epithelial phenotype of affected cells into an invasive, mesenchyme-like type contributes to metastasis formation.

[0249] In some embodiments, CTNNB1 gene is wild type CTNNB1 or CTNNB1 comprising one or more mutations. In some instances, CTNNB1 is wild type CTNNB1. In some instances, CTNNB1 is CTNNB1 comprising one or more mutations. In some instances, the polynucleic acid molecule is a polynucleic acid molecule that hybridizes to a target region of wild type CTNNB1. In some instances, the polynucleic acid molecule is a polynucleic acid molecule that hybridizes to a target region of CTNNB1 comprising a mutation (e.g., a substitution, a deletion, or an addition).

[0250] In some embodiments, CTNNB1 DNA or RNA comprises one or more mutations. In some embodiments, CTNNB1 DNA or RNA comprises one or more mutations within one or more exons. In some instances, the one or more exons comprise exon 3. In some instances, CTNNB1 DNA or RNA comprises one or more mutations at codons 32, 33, 34, 37, 41, 45, 183, 245, 287 or a combination thereof. In some instances, CTNNB1 DNA or RNA comprises one or more mutations at positions corresponding to amino acid residues 25, 31, 32, 33, 34, 35, 36, 37, 41, 45, 140, 162, 170, 199, 213, 215, 257, 303, 322, 334, 354, 367, 373, 383, 387, 402, 426, 453, 474, 486, 515, 517, 535, 553, 555, 582, 587, 619, 623, 641, 646, 688, 703, 710, 712, 714, 724, 738, 777, or a combination thereof of the CTNNB1 polypeptide. In some embodiments, CTNNB1 DNA or RNA comprises one or more mutations at positions corresponding to amino acid residues selected from W25 (nonsense mutation), L31M, D32A, D32N, D32Y, D32G, D32H, S33C, S33Y, S33F, S33P, G34R, G34E, G34V, I35S, H36Y, S37F, S37P, S37C, S37A, T41N, T41A, T41I, S45Y, S45F, S45C, I140T, D162E, K170M, V199I, C213F, A215T, T257I, I303M, Q322K, E334K, K354T, G367V, P373S, W383G, N387K, L402F, N426D, R453L, R453Q, R474 (nonsense mutation), R486C, R515Q, L517F, R535 (nonsense mutation), R535Q, M553V, G555A, R582Q, R587Q, C619Y, Q623E, T641 (frame shift), S646F, M688T, Q703H, R710H, D712N, P714R, Y724H, E738K, F777S, or a combination thereof of the CTNNB1 polypeptide.

[0251] In some embodiments, the polynucleic acid molecule hybridizes to a target region of CTNNB1 DNA or RNA comprising one or more mutations. In some embodiments, the polynucleic acid molecule hybridizes to a target region of CTNNB1 DNA or RNA comprising one or more mutations within exon 3. In some embodiments, the polynucleic acid molecule hybridizes to a target region of CTNNB1 DNA or RNA comprising one or more mutations at codons 32, 33, 34, 37, 41, 45, 183, 245, 287 or a combination thereof. In some embodiments, the polynucleic acid molecule hybridizes to a target region of CTNNB1 DNA or RNA comprising one or more mutations at positions corresponding to amino acid residues 25, 31, 32, 33, 34, 35, 36, 37, 41, 45, 140, 162, 170, 199, 213, 215, 257, 303, 322, 334, 354, 367, 373, 383, 387, 402, 426, 453, 474, 486, 515, 517, 535, 553, 555, 582, 587, 619, 623, 641, 646, 688, 703, 710, 712, 714, 724, 738, 777, or a combination thereof of the CTNNB1 polypeptide. In some embodiments, the polynucleic acid molecule hybridizes to a target region of CTNNB1 DNA or RNA comprising one or more mutations selected from W25 (nonsense mutation), L31M, D32A, D32N, D32Y, D32G, D32H, S33C, S33Y, S33F, S33P, G34R, G34E, G34V, I35S, H36Y, S37F, S37P, S37C, S37A, T41N, T41A, T41I, S45Y, S45F, S45C, I140T, D162E, K170M, V199I, C213F, A215T, T257I, I303M, Q322K, E334K, K354T, G367V, P373S, W383G, N387K, L402F, N426D, R453L, R453Q, R474 (nonsense mutation), R486C, R515Q, L517F, R535 (nonsense mutation), R535Q, M553V, G555A, R582Q, R587Q, C619Y, Q623E, T641 (frame shift), S646F, M688T, Q703H, R710H, D712N, P714R, Y724H, E738K, F777S, or a combination thereof of the CTNNB1 polypeptide.

[0252] In some embodiments, beta-catenin associated genes further comprise PIK3CA, PIK3CB, and MYC. In some embodiments, beta-catenin associated genes further comprise PIK3CA DNA or RNA. PIK3CA (phosphatidylinositol-4,5-bisphosphate 3-kinase, catalytic subunit alpha or p110α protein) is a class i PI 3-kinase catalytic subunit that uses ATP to phosphorylate phosphatidylinositols. In some embodiments, PIK3CA gene is wild type PIK3CA or PIK3CA comprising one or more mutations. In some instances, PIK3CA DNA or RNA is wild type PIK3CA. In some instances, PIK3CA DNA or RNA comprises one or more mutations. In some instances, the polynucleic acid molecule hybridizes to a target region of wild type PIK3CA DNA or RNA. In some instances, the polynucleic acid molecule hybridizes to a target region of PIK3CA DNA or RNA comprising a mutation (e.g., a substitution, a deletion, or an addition).

[0253] In some embodiments, PIK3CA DNA or RNA comprises one or more mutations. In some embodiments, PIK3CA DNA or RNA comprises one or more mutation within one or more exons. In some instances, PIK3CA DNA or RNA comprises one or more mutation within exons 9 and/or 20. In some instances, PIK3CA DNA or RNA comprises one or more mutations at positions corresponding to amino acid residues 1, 4, 10-16, 11-18, 11, 12, 38, 39, 65, 72, 75, 79, 81, 83, 88, 90, 93, 102, 103, 103-104, 103-106, 104, 105-108, 106, 106-107, 106-108, 107, 108, 109-112, 110, 111, 113, 115, 137, 170, 258, 272, 279, 320, 328, 335, 342, 344, 345, 350, 357, 359, 363, 364, 365, 366, 378, 398, 401, 417, 420, 447-455, 449, 449-457, 451, 453, 454, 455, 455-460, 463-465, 471, 495, 522, 538, 539, 542, 545, 546, 547, 576, 604, 614, 617, 629, 643, 663, 682, 725, 726, 777, 791, 818, 866, 901, 909, 939, 951, 958, 970, 971, 975, 992, 1004, 1007, 1016, 1017, 1021, 1025, 1029, 1037, 1040, 1043, 1044, 1045, 1047, 1048, 1049, 1052, 1065, 1069, or a combination thereof of the PIK3CA polypeptide. In some embodiments, PIK3CA DNA or RNA comprises one or more mutations at positions corresponding to amino acid residues selected from M1V, R4 (nonsense mutation), L10-M16 (deletion), W11-P18 (deletion), WI IL, G12D, R38L, R38H, R38C, R38S, E39K, E39G, E65K, S72G, Q75E, R79M, E81K, E81 (deletion), F83Y, R88Q, C90Y, C90G, R93Q, R93W, 1102 (deletion), E103G, E103-P104 (deletion), E103-G106 (deletion), P104L, V105-R108 (deletion), G106V, G106-N107 (deletion), G106-R108 (deletion), G106R, N107S, R108L, R108H, E109-1112 (deletion), E110 (deletion), K111E, K111R, K111N, K111 (deletion), L113 (deletion), R115L, Q137L, N170S, D258N, Y272 (nonsense mutation), L2791, G320V, W328S, R335G, T342S, V344G, V344M, V344A, N345K, N345I, N345T, D350N, D350G, R357Q, G359R, G363A, G364R, E365K, E365V, P366R, C378R, C378Y, R398H, R401Q, E417K, C420R, C420G, P447-L455 (deletion), P449L, P449-N457 (deletion), G451R, G451V, E453K, E453Q, E453D, D454Y, L455 (frame shift insertion), L455-G460 (deletion), G463-N465 (deletion), P471L, P471A, H495L, H495Y, E522A, D538N, P539R, E542K, E542V, E542G, E542Q, E542A, E545K, E545A, E545G, E545Q, E545D, Q546K, Q546R, Q546P, E547D, S576Y, C604R, F6141, A617W, S629C, Q643H, 1663S, Q682 (deletion), D725N, W726K, R777M, E791Q, R818C, L866W, C901F, F909L, D939G, R951C, Q958R, E970K, C971R, R975S, R992P, M10041, G1007R, F1016C, D1017H, Y1021H, Y1021C, T1025A, T1025S, D1029H, E1037K, M1040V, M1043V, M10431, N1044K, N1044Y, D1045V, H1047R, H1047L, H1047Y, H1047Q, H1048R, G1049R, T1052K, H1065L, 1069W (nonstop mutation), or a combination thereof of the PIK3CA polypeptide.

[0254] In some embodiments, the polynucleic acid molecule hybridizes to a target region of PIK3CA DNA or RNA comprising one or more mutations. In some embodiments, the polynucleic acid molecule hybridizes to a target region of PIK3CA DNA or RNA comprising one or more mutations within an exon. In some embodiments, the polynucleic acid molecule hybridizes to a target region of PIK3CA DNA or RNA comprising one or more mutations within exon 9 or exon 20. In some embodiments, the polynucleic acid molecule hybridizes to a target region of PIK3CA DNA or RNA comprising one or more mutations at positions corresponding to amino acid residues 1, 4, 10-16, 11-18, 11, 12, 38, 39, 65, 72, 75, 79, 81, 83, 88, 90, 93, 102, 103, 103-104, 103-106, 104, 105-108, 106, 106-107, 106-108, 107, 108, 109-112, 110, 111, 113, 115, 137, 170, 258, 272, 279, 320, 328, 335, 342, 344, 345, 350, 357, 359, 363, 364, 365, 366, 378, 398, 401, 417, 420, 447-455, 449, 449-457, 451, 453, 454, 455, 455-460, 463-465, 471, 495, 522, 538, 539, 542, 545, 546, 547, 576, 604, 614, 617, 629, 643, 663, 682, 725, 726, 777, 791, 818, 866, 901, 909, 939, 951, 958, 970, 971, 975, 992, 1004, 1007, 1016, 1017, 1021, 1025, 1029, 1037, 1040, 1043, 1044, 1045, 1047, 1048, 1049, 1052, 1065, 1069, or a combination thereof of the PIK3CA polypeptide. In some embodiments, the polynucleic acid molecule is a polynucleic acid molecule that hybridizes to a target region of PIK3CA DNA or RNA comprising one or more mutations at positions corresponding to amino acid residues selected from M1V, R4 (nonsense mutation), L10-M16 (deletion), W11-P18 (deletion), W11L, G12D, R38L, R38H, R38C, R38S, E39K, E39G, E65K, S72G, Q75E, R79M, E81K, E81 (deletion), F83Y, R88Q, C90Y, C90G, R93Q, R93W, 1102 (deletion), E103G, E103-P104 (deletion), E103-G106 (deletion), P104L, V105-R108 (deletion), G106V, G106-N107 (deletion), G106-R108 (deletion), G106R, N107S, R108L, R108H, E109-I112 (deletion), E110 (deletion), K111E, K111R, K111N, K111 (deletion), L113 (deletion), R115L, Q137L, N170S, D258N, Y272 (nonsense mutation), L2791, G320V, W328S, R335G, T342S, V344G, V344M, V344A, N345K, N345I, N345T, D350N, D350G, R357Q, G359R, G363A, G364R, E365K, E365V, P366R, C378R, C378Y, R398H, R401Q, E417K, C420R, C420G, P447-L455 (deletion), P449L, P449-N457 (deletion), G451R, G451V, E453K, E453Q, E453D, D454Y, L455 (frame shift insertion), L455-G460 (deletion), G463-N465 (deletion), P471L, P471A, H495L, H495Y, E522A, D538N, P539R, E542K, E542V, E542G, E542Q, E542A, E545K, E545A, E545G, E545Q, E545D, Q546K, Q546R, Q546P, E547D, S576Y, C604R, F6141, A617W, S629C, Q643H, 1663S, Q682 (deletion), D725N, W726K, R777M, E791Q, R818C, L866W, C901F, F909L, D939G, R951C, Q958R, E970K, C971R, R975S, R992P, M10041, G1007R, F1016C, D1017H, Y1021H, Y1021C, T1025A, T1025S, D1029H, E1037K, M1040V, M1043V, M10431, N1044K, N1044Y, D1045V, H1047R, H1047L, H1047Y, H1047Q, H1048R, G1049R, T1052K, H1065L, 1069W (nonstop mutation), or a combination thereof of the PIK3CB polypeptide.

[0255] In some embodiments, beta-catenin associated genes further comprise PIK3CB. In some embodiments, PIK3CB gene is wild type or comprises one or more mutations. In some instances, PIK3CB DNA or RNA is wild type PIK3CB DNA or RNA. In some instances, PIK3CB DNA or RNA comprises one or more mutations. In some instances, the polynucleic acid molecule hybridizes to a target region of wild type PIK3CB DNA or RNA. In some instances, the polynucleic acid molecule hybridizes to a target region of PIK3CB DNA or RNA comprising a mutation (e.g., a substitution, a deletion, or an addition).

[0256] In some embodiments, PIK3CB DNA or RNA comprises one or more mutations. In some embodiments, PIK3CB DNA or RNA comprises one or more mutations within one or more exons. In some instances, PIK3CB DNA or RNA comprises one or more mutations at positions corresponding to amino acid residues 18, 19, 21, 28, 50, 61, 68, 103, 135, 140, 167, 252, 270, 290, 301, 304, 321, 369, 417, 442, 470, 497, 507, 512, 540, 551, 552, 554, 562, 567, 593, 595, 619, 628, 668, 768, 805, 824, 830, 887, 967, 992, 1005, 1020, 1036, 1046, 1047, 1048, 1049, 1051, 1055, 1067, or a combination thereof of the PIK3CB polypeptide. In some embodiments, PIK3CB DNA or RNA comprises one or more mutations at positions corresponding to amino acid residues selected from W18 (nonsense mutation), A19V, D21H, G28S, A50P, K61T, M68I, R103K, H135N, L140S, S167C, G252W, R270W, K290N, E301V, I304R, R321Q, V3691, T417M, N442K, E470K, E497D, P507S, 1512M, E540 (nonsense mutation), C551R, E552K, E554K, R562 (nonsense mutation), E567D, A593V, L595P, V619A, R628 (nonsense mutation), R668W, L768F, K805E, D824E, A830T, E887 (nonsense mutation), V967A, I992T, A1005V, D1020H, E1036K, D1046N, E1047K, A1048V, L1049R, E1051K, T1055A, D1067V, D1067A, or a combination thereof of the PIK3CB polypeptide.

[0257] In some embodiments, the polynucleic acid molecule hybridizes to a target region of PIK3CB DNA or RNA comprising one or more mutations. In some embodiments, the polynucleic acid molecule hybridizes to a target region of PIK3CB DNA or RNA comprising one or more mutations within an exon. In some embodiments, the polynucleic acid molecule hybridizes to a target region of PIK3CB DNA or RNA comprising one or more mutations at positions corresponding to amino acid residues 18, 19, 21, 28, 50, 61, 68, 103, 135, 140, 167, 252, 270, 290, 301, 304, 321, 369, 417, 442, 470, 497, 507, 512, 540, 551, 552, 554, 562, 567, 593, 595, 619, 628, 668, 768, 805, 824, 830, 887, 967, 992, 1005, 1020, 1036, 1046, 1047, 1048, 1049, 1051, 1055, 1067, or a combination thereof of the PIK3CB polypeptide. In some embodiments, the polynucleic acid molecule hybridizes to a target region of PIK3CB DNA or RNA comprising one or more mutations at positions corresponding to amino acid residues selected from W18 (nonsense mutation), A19V, D21H, G28S, A50P, K61T, M68I, R103K, H135N, L140S, S167C, G252W, R270W, K290N, E301V, 1304R, R321Q, V3691, T417M, N442K, E470K, E497D, P507S, 1512M, E540 (nonsense mutation), C551R, E552K, E554K, R562 (nonsense mutation), E567D, A593V, L595P, V619A, R628 (nonsense mutation), R668W, L768F, K805E, D824E, A830T, E887 (nonsense mutation), V967A, 1992T, A1005V, D1020H, E1036K, D1046N, E1047K, A1048V, L1049R, E1051K, T1055A, D1067V, D1067A, or a combination thereof of the PIK3CB polypeptide.

[0258] In some embodiments, beta-catenin associated genes further comprise MYC. In some embodiments, MYC gene is wild type MYC or MYC comprising one or more mutations. In some instances, MYC is wild type MYC DNA or RNA. In some instances, MYC DNA or RNA comprises one or more mutations. In some instances, the polynucleic acid molecule hybridizes to a target region of wild type MYC DNA or RNA. In some instances, the polynucleic acid molecule is a polynucleic acid molecule that hybridizes to a target region of MYC DNA or RNA comprising a mutation (e.g., a substitution, a deletion, or an addition).

[0259] In some embodiments, MYC DNA or RNA comprises one or more mutations. In some embodiments, MYC DNA or RNA comprises one or more mutation within one or more exons. In some instances, MYC DNA or RNA comprises one or more mutations within exon 2 or exon 3. In some instances, MYC DNA or RNA comprises one or more mutations at positions corresponding to amino acid residues 2, 7, 17, 20, 32, 44, 58, 59, 76, 115, 138, 141, 145, 146, 169, 175, 188, 200, 202, 203, 248, 251, 298, 321, 340, 369, 373, 374, 389, 395, 404, 419, 431, 439, or a combination thereof. In some embodiments, MYC DNA or RNA comprises one or more mutations at positions corresponding to amino acid residues selected from P2L, F7L, D17N, Q20E, Y32N, A44V, A44T, T58I, P59L, A76V, F115L, F138S, A141S, V145I, S146L, S169C, S175N, C188F, N200S, S202N, S203T, T248S, D251E, S298Y, Q321E, V340D, V369D, T373K, H374R, F389L, Q395H, K404N, L419M, E431K, R439Q, or a combination thereof of the MYC polypeptide.

[0260] In some embodiments, the polynucleic acid molecule hybridizes to a target region of MYC DNA or RNA comprising one or more mutations. In some embodiments, the polynucleic acid molecule hybridizes to a target region of MYC DNA or RNA comprising one or more mutations within an exon. In some embodiments, the polynucleic acid molecule hybridizes to a target region of MYC DNA or RNA comprising one or more mutations within exon 2 or exon 3. In some embodiments, the polynucleic acid molecule hybridizes to a target region of MYC DNA or RNA comprising one or more mutations at positions corresponding to amino acid residues 2, 7, 17, 20, 32, 44, 58, 59, 76, 115, 138, 141, 145, 146, 169, 175, 188, 200, 202, 203, 248, 251, 298, 321, 340, 369, 373, 374, 389, 395, 404, 419, 431, 439, or a combination thereof of the MYC polypeptide. In some embodiments, the polynucleic acid molecule hybridizes to a target region of MYC DNA or RNA comprising one or more mutations at positions corresponding to amino acid residues selected from P2L, F7L, D17N, Q20E, Y32N, A44V, A44T, T58I, P59L, A76V, F115L, F138S, A141S, V145I, S146L, S169C, S175N, C188F, N200S, S202N, S203T, T248S, D251E, S298Y, Q321E, V340D, V369D, T373K, H374R, F389L, Q395H, K404N, L419M, E431K, R439Q, or a combination thereof of the MYC polypeptide.

### Polynucleic Acid Molecules That Target Hypoxanthine Phosphoribosyltransferase 1 (HPRT1)

[0261] Hypoxanthine-guanine phosphoribosyltransferase (HGPRT) is a transferase that catalyzes the conversion of hypoxanthine to inosine monophosphate and guanine to guanosine monophosphate. HGPRT is encoded by the hypoxanthine Phosphoribosyltransferase 1 (HPRT1) gene.

[0262] In some embodiments, HPRT1 DNA or RNA is wild type or comprises one or more mutations. In some instances, HPRT1 DNA or RNA comprises one or more mutations within one or more exons. In some instances, the one or more exons comprise exon 2, exon 3, exon 4, exon 6, exon 8, or exon 9. In some instances, HPRT1 DNA or RNA comprises one or more mutations at positions corresponding to amino acid residues 35, 48, 56, 74, 87, 129, 154, 162, 195, 200, 210, or a combination thereof of the HPRT1 polypeptide. In some embodiments, the polynucleic acid molecule hybridizes to a target region of HPRT1 DNA or RNA comprising one or more mutations selected from V35M, R48H, E56D, F74L, R871, N129 (splice-site mutation), N154H, S162 (splice-site mutation), Y195C, Y195N, R200M, E210K, or a combination thereof of the HPRT1 polypeptide.

[0263] In some embodiments, the polynucleic acid molecule hybridizes to a target region of HPRT1 DNA or RNA comprising one or more mutations. In some embodiments, the polynucleic acid molecule hybridizes to a target region of HPRT1 DNA or RNA comprising one or more mutations within exon 2, exon 3, exon 4, exon 6, exon 8, or exon 9. In some embodiments, the polynucleic acid molecule hybridizes to a target region of HPRT1 DNA or RNA comprising one or more mutations at positions corresponding to amino acid residues 35, 48, 56, 74, 87, 129, 154, 162, 195, 200, 210, or a combination thereof of the HPRT1 polypeptide. In some embodiments, the polynucleic acid molecule hybridizes to a target region of HPRT1 DNA or RNA comprising one or more mutations selected from V35M, R48H, E56D, F74L, R871, N129 (splice-site mutation), N154H, S162 (splice-site mutation), Y195C, Y195N, R200M, E210K, or a combination thereof of the HPRT1 polypeptide.

### Polynucleic Acid Molecule Sequences

[0264] In some embodiments, the polynucleic acid molecule comprises a sequence that hybridizes to a target sequence illustrated in Tables 1, 4, 7, 8, or 10. In some instances, the polynucleic acid molecule is B. In some instances, the polynucleic acid molecule B comprises a sequence that hybridizes to a target sequence illustrated in Table 1 (KRAS target sequences). In some instances, the polynucleic acid molecule B comprises a sequence that hybridizes to a target sequence illustrated in Table 4 (EGFR target sequences). In some cases, the polynucleic acid molecule B comprises a sequence that hybridizes to a target sequence illustrated in Table 7 (AR target sequences). In some cases, the polynucleic acid molecule B comprises a sequence that hybridizes to a target sequence illustrated in Table 8 (p-catenin target sequences). In additional cases, the polynucleic acid molecule B comprises a sequence that hybridizes to a target sequence illustrated in Table 10 (PIK3CA and PIK3CB target sequences).

[0265] In some embodiments, the polynucleic acid molecule B comprises a sequence having at least 50%, 55%, 60%, 65%, 70%, 75%, 80%, 85%, 90%, 95%, 96%, 97%, 98%, 99%, or 100% sequence identity to a sequence listed in Table 2 or Table 3. In some embodiments, the polynucleic acid molecule comprises a sequence having at least 50%, 55%, 60%, 65%, 70%, 75%, 80%, 85%, 90%, 95%, 96%, 97%, 98%, 99%, or 100% sequence identity to SEQ ID NOs: 16-75. In some embodiments, the polynucleic acid molecule comprises a sequence having at least 50% sequence identity to SEQ ID NOs: 16-75. In some embodiments, the polynucleic acid molecule comprises a sequence having at least 60% sequence identity to SEQ ID NOs: 16-75. In some embodiments, the polynucleic acid molecule comprises a sequence having at least 70% sequence identity to SEQ ID NOs: 16-75. In some embodiments, the polynucleic acid molecule comprises a sequence having at least 75% sequence identity to SEQ ID NOs: 16-75. In some embodiments, the polynucleic acid molecule comprises a sequence having at least 80% sequence identity to SEQ ID NOs: 16-75. In some embodiments, the polynucleic acid molecule comprises a sequence having at least 85% sequence identity to SEQ ID NOs: 16-75. In some embodiments, the polynucleic acid molecule comprises a sequence having at least 90% sequence identity to SEQ ID NOs: 16-75. In some embodiments, the polynucleic acid molecule comprises a sequence having at least 95% sequence identity to SEQ ID NOs: 16-75. In some embodiments, the polynucleic acid molecule comprises a sequence having at least 96% sequence identity to SEQ ID NOs: 16-75. In some embodiments, the polynucleic acid molecule comprises a sequence having at least 97% sequence identity to SEQ ID NOs: 16-75. In some embodiments, the polynucleic acid molecule comprises a sequence having at least 98% sequence identity to SEQ ID NOs: 16-75. In some embodiments, the polynucleic acid molecule comprises a sequence having at least 99% sequence identity to SEQ ID NOs: 16-75. In some embodiments, the polynucleic acid molecule consists of SEQ ID NOs: 16-75.

[0266] In some embodiments, the polynucleic acid molecule B comprises a first polynucleotide and a second polynucleotide. In some instances, the first polynucleotide comprises a sequence having at least 50%, 55%, 60%, 65%, 70%, 75%, 80%, 85%, 90%, 95%, 96%, 97%, 98%, 99%, or 100% sequence identity to SEQ ID NOs: 16-75. In some cases, the second polynucleotide comprises a sequence having at least 50%, 55%, 60%, 65%, 70%, 75%, 80%, 85%, 90%, 95%, 96%, 97%, 98%, 99%, or 100% sequence identity to SEQ ID NOs: 16-75. In some cases, the polynucleic acid molecule comprises a first polynucleotide having at least 50%, 55%, 60%, 65%, 70%, 75%, 80%, 85%, 90%, 95%, 96%, 97%, 98%, 99%, or 100% sequence identity to SEQ ID NOs: 16-75 and a second polynucleotide having at least 50%, 55%, 60%, 65%, 70%, 75%, 80%, 85%, 90%, 95%, 96%, 97%, 98%, 99%, or 100% sequence identity to SEQ ID NOs: 16-75.

[0267] In some embodiments, the polynucleic acid molecule B comprises a sequence having at least 50%, 55%, 60%, 65%, 70%, 75%, 80%, 85%, 90%, 95%, 96%, 97%, 98%, 99%, or 100% sequence identity to a sequence listed in Table 5 or Table 6. In some embodiments, the polynucleic acid molecule comprises a sequence having at least 50%, 55%, 60%, 65%, 70%, 75%, 80%, 85%, 90%, 95%, 96%, 97%, 98%, 99%, or 100% sequence identity to SEQ ID NOs: 452-1955. In some embodiments, the polynucleic acid molecule comprises a sequence having at least 50% sequence identity to SEQ ID NOs: 452-1955. In some embodiments, the polynucleic acid molecule comprises a sequence having at least 60% sequence identity to SEQ ID NOs: 452-1955. In some embodiments, the polynucleic acid molecule comprises a sequence having at least 70% sequence identity to SEQ ID NOs: 452-1955. In some embodiments, the polynucleic acid molecule comprises a sequence having at least 75% sequence identity to SEQ ID NOs: 452-1955. In some embodiments, the polynucleic acid molecule comprises a sequence having at least 80% sequence identity to SEQ ID NOs: 452-1955. In some embodiments, the polynucleic acid molecule comprises a sequence having at least 85% sequence identity to SEQ ID NOs: 452-1955. In some embodiments, the polynucleic acid molecule comprises a sequence having at least 90% sequence identity to SEQ ID NOs: 452-1955. In some embodiments, the polynucleic acid molecule comprises a sequence having at least 95% sequence identity to SEQ ID NOs: 452-1955. In some embodiments, the polynucleic acid molecule comprises a sequence having at least 96% sequence identity to SEQ ID NOs: 452-1955. In some embodiments, the polynucleic acid molecule comprises a sequence having at least 97% sequence identity to SEQ ID NOs: 452-1955. In some embodiments, the polynucleic acid molecule comprises a sequence having at least 98% sequence identity to SEQ ID NOs: 452-1955. In some embodiments, the polynucleic acid molecule comprises a sequence having at least 99% sequence identity to SEQ ID NOs: 452-1955. In some embodiments, the polynucleic acid molecule consists of SEQ ID NOs: 452-1955.

[0268] In some embodiments, the polynucleic acid molecule B comprises a first polynucleotide and a second polynucleotide. In some instances, the first polynucleotide comprises a sequence having at least 50%, 55%, 60%, 65%, 70%, 75%, 80%, 85%, 90%, 95%, 96%, 97%, 98%, 99%, or 100% sequence identity to SEQ ID NOs: 452-1955. In some cases, the second polynucleotide comprises a sequence having at least 50%, 55%, 60%, 65%, 70%, 75%, 80%, 85%, 90%, 95%, 96%, 97%, 98%, 99%, or 100% sequence identity to SEQ ID NOs: 452-1955. In some cases, the polynucleic acid molecule comprises a first polynucleotide having at least 50%, 55%, 60%, 65%, 70%, 75%, 80%, 85%, 90%, 95%, 96%, 97%, 98%, 99%, or 100% sequence identity to SEQ ID NOs: 452-1955 and a second polynucleotide having at least 50%, 55%, 60%, 65%, 70%, 75%, 80%, 85%, 90%, 95%, 96%, 97%, 98%, 99%, or 100% sequence identity to SEQ ID NOs: 452-1955.

[0269] In some embodiments, the polynucleic acid molecule B comprises a sequence having at least 50%, 55%, 60%, 65%, 70%, 75%, 80%, 85%, 90%, 95%, 96%, 97%, 98%, 99%, or 100% sequence identity to a sequence listed in Table 7. In some embodiments, the polynucleic acid molecule comprises a sequence having at least 50%, 55%, 60%, 65%, 70%, 75%, 80%, 85%, 90%, 95%, 96%, 97%, 98%, 99%, or 100% sequence identity to SEQ ID NOs: 1956-1962. In some embodiments, the polynucleic acid molecule comprises a sequence having at least 50% sequence identity to SEQ ID NOs: 1956-1962. In some embodiments, the polynucleic acid molecule comprises a sequence having at least 60% sequence identity to SEQ ID NOs: 1956-1962. In some embodiments, the polynucleic acid molecule comprises a sequence having at least 70% sequence identity to SEQ ID NOs: 1956-1962. In some embodiments, the polynucleic acid molecule comprises a sequence having at least 75% sequence identity to SEQ ID NOs: 1956-1962. In some embodiments, the polynucleic acid molecule comprises a sequence having at least 80% sequence identity to SEQ ID NOs: 1956-1962. In some embodiments, the polynucleic acid molecule comprises a sequence having at least 85% sequence identity to SEQ ID NOs: 1956-1962. In some embodiments, the polynucleic acid molecule comprises a sequence having at least 90% sequence identity to SEQ ID NOs: 1956-1962. In some embodiments, the polynucleic acid molecule comprises a sequence having at least 95% sequence identity to SEQ ID NOs: 1956-1962. In some embodiments, the polynucleic acid molecule comprises a sequence having at least 96% sequence identity to SEQ ID NOs: 1956-1962. In some embodiments, the polynucleic acid molecule comprises a sequence having at least 97% sequence identity to SEQ ID NOs: 1956-1962. In some embodiments, the polynucleic acid molecule comprises a sequence having at least 98% sequence identity to SEQ ID NOs: 1956-1962. In some embodiments, the polynucleic acid molecule comprises a sequence having at least 99% sequence identity to SEQ ID NOs: 1956-1962. In some embodiments, the polynucleic acid molecule consists of SEQ ID NOs: 1956-1962.

[0270] In some embodiments, the polynucleic acid molecule B comprises a first polynucleotide and a second polynucleotide. In some instances, the first polynucleotide comprises a sequence having at least 50%, 55%, 60%, 65%, 70%, 75%, 80%, 85%, 90%, 95%, 96%, 97%, 98%, 99%, or 100% sequence identity to SEQ ID NOs: 1956-1962. In some cases, the second polynucleotide comprises a sequence that is complementary to a sequence having at least 50%, 55%, 60%, 65%, 70%, 75%, 80%, 85%, 90%, 95%, 96%, 97%, 98%, 99%, or 100% sequence identity to SEQ ID NOs: 1956-1962. In some instances, the polynucleic acid molecule comprises a first polynucleotide having at least 50%, 55%, 60%, 65%, 70%, 75%, 80%, 85%, 90%, 95%, 96%, 97%, 98%, 99%, or 100% sequence identity to SEQ ID NOs: 1956-1962, and a second polynucleotide that is complementary to a sequence having at least 50%, 55%, 60%, 65%, 70%, 75%, 80%, 85%, 90%, 95%, 96%, 97%, 98%, 99%, or 100% sequence identity to SEQ ID NOs: 1956-1962.

[0271] In some embodiments, the polynucleic acid molecule B comprises a sequence having at least 50%, 55%, 60%, 65%, 70%, 75%, 80%, 85%, 90%, 95%, 96%, 97%, 98%, 99%, or 100% sequence identity to a sequence listed in Table 9. In some embodiments, the polynucleic acid molecule comprises a sequence having at least 50%, 55%, 60%, 65%, 70%, 75%, 80%, 85%, 90%, 95%, 96%, 97%, 98%, 99%, or 100% sequence identity to SEQ ID NOs: 1967-2002. In some embodiments, the polynucleic acid molecule comprises a sequence having at least 50% sequence identity to SEQ ID NOs: 1967-2002. In some embodiments, the polynucleic acid molecule comprises a sequence having at least 60% sequence identity to SEQ ID NOs: 1967-2002. In some embodiments, the polynucleic acid molecule comprises a sequence having at least 70% sequence identity to SEQ ID NOs: 1967-2002. In some embodiments, the polynucleic acid molecule comprises a sequence having at least 75% sequence identity to SEQ ID NOs: 1967-2002. In some embodiments, the polynucleic acid molecule comprises a sequence having at least 80% sequence identity to SEQ ID NOs: 1967-2002. In some embodiments, the polynucleic acid molecule comprises a sequence having at least 85% sequence identity to SEQ ID NOs: 1967-2002. In some embodiments, the polynucleic acid molecule comprises a sequence having at least 90% sequence identity to SEQ ID NOs: 1967-2002. In some embodiments, the polynucleic acid molecule comprises a sequence having at least 95% sequence identity to SEQ ID NOs: 1967-2002. In some embodiments, the polynucleic acid molecule comprises a sequence having at least 96% sequence identity to SEQ ID NOs: 1967-2002. In some embodiments, the polynucleic acid molecule comprises a sequence having at least 97% sequence identity to SEQ ID NOs: 1967-2002. In some embodiments, the polynucleic acid molecule comprises a sequence having at least 98% sequence identity to SEQ ID NOs: 1967-2002. In some embodiments, the polynucleic acid molecule comprises a sequence having at least 99% sequence identity to SEQ ID NOs: 1967-2002. In some embodiments, the polynucleic acid molecule consists of SEQ ID NOs: 1967-2002.

[0272] In some embodiments, the polynucleic acid molecule B comprises a first polynucleotide and a second polynucleotide. In some instances, the first polynucleotide comprises a sequence having at least 50%, 55%, 60%, 65%, 70%, 75%, 80%, 85%, 90%, 95%, 96%, 97%, 98%, 99%, or 100% sequence identity to SEQ ID NOs: 1967-2002. In some cases, the second polynucleotide comprises a sequence having at least 50%, 55%, 60%, 65%, 70%, 75%, 80%, 85%, 90%, 95%, 96%, 97%, 98%, 99%, or 100% sequence identity to SEQ ID NOs: 1967-2002. In some cases, the polynucleic acid molecule comprises a first polynucleotide having at least 50%, 55%, 60%, 65%, 70%, 75%, 80%, 85%, 90%, 95%, 96%, 97%, 98%, 99%, or 100% sequence identity to SEQ ID NOs: 1967-2002 and a second polynucleotide having at least 50%, 55%, 60%, 65%, 70%, 75%, 80%, 85%, 90%, 95%, 96%, 97%, 98%, 99%, or 100% sequence identity to SEQ ID NOs: 1967-2002.

[0273] In some embodiments, the polynucleic acid molecule B comprises a sequence having at least 50%, 55%, 60%, 65%, 70%, 75%, 80%, 85%, 90%, 95%, 96%, 97%, 98%, 99%, or 100% sequence identity to a sequence listed in Table 11. In some embodiments, the polynucleic acid molecule comprises a sequence having at least 50%, 55%, 60%, 65%, 70%, 75%, 80%, 85%, 90%, 95%, 96%, 97%, 98%, 99%, or 100% sequence identity to SEQ ID NOs: 2013-2032. In some embodiments, the polynucleic acid molecule comprises a sequence having at least 50% sequence identity to SEQ ID NOs: 2013-2032. In some embodiments, the polynucleic acid molecule comprises a sequence having at least 60% sequence identity to SEQ ID NOs: 2013-2032. In some embodiments, the polynucleic acid molecule comprises a sequence having at least 70% sequence identity to SEQ ID NOs: 2013-2032. In some embodiments, the polynucleic acid molecule comprises a sequence having at least 75% sequence identity to SEQ ID NOs: 2013-2032. In some embodiments, the polynucleic acid molecule comprises a sequence having at least 80% sequence identity to SEQ ID NOs: 2013-2032. In some embodiments, the polynucleic acid molecule comprises a sequence having at least 85% sequence identity to SEQ ID NOs: 2013-2032. In some embodiments, the polynucleic acid molecule comprises a sequence having at least 90% sequence identity to SEQ ID NOs: 2013-2032. In some embodiments, the polynucleic acid molecule comprises a sequence having at least 95% sequence identity to SEQ ID NOs: 2013-2032. In some embodiments, the polynucleic acid molecule comprises a sequence having at least 96% sequence identity to SEQ ID NOs: 2013-2032. In some embodiments, the polynucleic acid molecule comprises a sequence having at least 97% sequence identity to SEQ ID NOs: 2013-2032. In some embodiments, the polynucleic acid molecule comprises a sequence having at least 98% sequence identity to SEQ ID NOs: 2013-2032. In some embodiments, the polynucleic acid molecule comprises a sequence having at least 99% sequence identity to SEQ ID NOs: 2013-2032. In some embodiments, the polynucleic acid molecule consists of SEQ ID NOs: 2013-2032.

[0274] In some embodiments, the polynucleic acid molecule B comprises a first polynucleotide and a second polynucleotide. In some instances, the first polynucleotide comprises a sequence having at least 50%, 55%, 60%, 65%, 70%, 75%, 80%, 85%, 90%, 95%, 96%, 97%, 98%, 99%, or 100% sequence identity to SEQ ID NOs: 2013-2032. In some cases, the second polynucleotide comprises a sequence having at least 50%, 55%, 60%, 65%, 70%, 75%, 80%, 85%, 90%, 95%, 96%, 97%, 98%, 99%, or 100% sequence identity to SEQ ID NOs: 2013-2032. In some cases, the polynucleic acid molecule comprises a first polynucleotide having at least 50%, 55%, 60%, 65%, 70%, 75%, 80%, 85%, 90%, 95%, 96%, 97%, 98%, 99%, or 100% sequence identity to SEQ ID NOs: 2013-2032 and a second polynucleotide having at least 50%, 55%, 60%, 65%, 70%, 75%, 80%, 85%, 90%, 95%, 96%, 97%, 98%, 99%, or 100% sequence identity to SEQ ID NOs: 2013-2032.

[0275] In some embodiments, the polynucleic acid molecule B comprises a sequence having at least 50%, 55%, 60%, 65%, 70%, 75%, 80%, 85%, 90%, 95%, 96%, 97%, 98%, 99%, or 100% sequence identity to a sequence listed in Table 12.

[0276] In some embodiments, the polynucleic acid molecule comprises a sequence having at least 50%, 55%, 60%, 65%, 70%, 75%, 80%, 85%, 90%, 95%, 96%, 97%, 98%, 99%, or 100% sequence identity to SEQ ID NOs: 2082-2109 or 2117. In some embodiments, the polynucleic acid molecule comprises a sequence having at least 50% sequence identity to SEQ ID NOs: 2082-2109 or 2117. In some embodiments, the polynucleic acid molecule comprises a sequence having at least 60% sequence identity to SEQ ID NOs: 2082-2109 or 2117. In some embodiments, the polynucleic acid molecule comprises a sequence having at least 70% sequence identity to SEQ ID NOs: 2082-2109 or 2117. In some embodiments, the polynucleic acid molecule comprises a sequence having at least 75% sequence identity to SEQ ID NOs: 2082-2109 or 2117. In some embodiments, the polynucleic acid molecule comprises a sequence having at least 80% sequence identity to SEQ ID NOs: 2082-2109 or 2117. In some embodiments, the polynucleic acid molecule comprises a sequence having at least 85% sequence identity to SEQ ID NOs: 2082-2109 or 2117. In some embodiments, the polynucleic acid molecule comprises a sequence having at least 90% sequence identity to SEQ ID NOs: 2082-2109 or 2117. In some embodiments, the polynucleic acid molecule comprises a sequence having at least 95% sequence identity to SEQ ID NOs: 2082-2109 or 2117. In some embodiments, the polynucleic acid molecule comprises a sequence having at least 96% sequence identity to SEQ ID NOs: 2082-2109 or 2117. In some embodiments, the polynucleic acid molecule comprises a sequence having at least 97% sequence identity to SEQ ID NOs: 2082-2109 or 2117. In some embodiments, the polynucleic acid molecule comprises a sequence having at least 98% sequence identity to SEQ ID NOs: 2082-2109 or 2117. In some embodiments, the polynucleic acid molecule comprises a sequence having at least 99% sequence identity to SEQ ID NOs: 2082-2109 or 2117. In some embodiments, the polynucleic acid molecule consists of SEQ ID NOs: 2082-2109 or 2117.

[0277] In some embodiments, the polynucleic acid molecule B comprises a first polynucleotide and a second polynucleotide. In some instances, the first polynucleotide comprises a sequence having at least 50%, 55%, 60%, 65%, 70%, 75%, 80%, 85%, 90%, 95%, 96%, 97%, 98%, 99%, or 100% sequence identity to SEQ ID NOs: 2082-2109 or 2117. In some cases, the second polynucleotide comprises a sequence having at least 50%, 55%, 60%, 65%, 70%, 75%, 80%, 85%, 90%, 95%, 96%, 97%, 98%, 99%, or 100% sequence identity to SEQ ID NOs: 2082-2109 or 2117. In some cases, the polynucleic acid molecule comprises a first polynucleotide having at least 50%, 55%, 60%, 65%, 70%, 75%, 80%, 85%, 90%, 95%, 96%, 97%, 98%, 99%, or 100% sequence identity to SEQ ID NOs: 2082-2109 or 2117 and a second polynucleotide having at least 50%, 55%, 60%, 65%, 70%, 75%, 80%, 85%, 90%, 95%, 96%, 97%, 98%, 99%, or 100% sequence identity to SEQ ID NOs: 2082-2109 or 2117.

### Polynucleic Acid Molecules

[0278] In some embodiments, the polynucleic acid molecule described herein comprises RNA or DNA. In some cases, the polynucleic acid molecule comprises RNA. In some instances, RNA comprises short interfering RNA (siRNA), short hairpin RNA (shRNA), microRNA (miRNA), double-stranded RNA (dsRNA), transfer RNA (tRNA), ribosomal RNA (rRNA), or heterogeneous nuclear RNA (hnRNA). In some instances, RNA comprises shRNA. In some instances, RNA comprises miRNA. In some instances, RNA comprises dsRNA. In some instances, RNA comprises tRNA. In some instances, RNA comprises rRNA. In some instances, RNA comprises hnRNA. In some instances, the RNA comprises siRNA. In some instances, the polynucleic acid molecule comprises siRNA. In some cases, B comprises siRNA.

[0279] In some embodiments, the polynucleic acid molecule is from about 10 to about 50 nucleotides in length. In some instances, the polynucleic acid molecule is from about 10 to about 30, from about 15 to about 30, from about 18 to about 25, from about 18 to about 24, from about 19 to about 23, or from about 20 to about 22 nucleotides in length.

[0280] In some embodiments, the polynucleic acid molecule is about 50 nucleotides in length. In some instances, the polynucleic acid molecule is about 45 nucleotides in length. In some instances, the polynucleic acid molecule is about 40 nucleotides in length. In some instances, the polynucleic acid molecule is about 35 nucleotides in length. In some instances, the polynucleic acid molecule is about 30 nucleotides in length. In some instances, the polynucleic acid molecule is about 25 nucleotides in length. In some instances, the polynucleic acid molecule is about 20 nucleotides in length. In some instances, the polynucleic acid molecule is about 19 nucleotides in length. In some instances, the polynucleic acid molecule is about 18 nucleotides in length. In some instances, the polynucleic acid molecule is about 17 nucleotides in length. In some instances, the polynucleic acid molecule is about 16 nucleotides in length. In some instances, the polynucleic acid molecule is about 15 nucleotides in length. In some instances, the polynucleic acid molecule is about 14 nucleotides in length. In some instances, the polynucleic acid molecule is about 13 nucleotides in length. In some instances, the polynucleic acid molecule is about 12 nucleotides in length. In some instances, the polynucleic acid molecule is about 11 nucleotides in length. In some instances, the polynucleic acid molecule is about 10 nucleotides in length. In some instances, the polynucleic acid molecule is from about 10 to about 50 nucleotides in length. In some instances, the polynucleic acid molecule is from about 10 to about 45 nucleotides in length. In some instances, the polynucleic acid molecule is from about 10 to about 40 nucleotides in length. In some instances, the polynucleic acid molecule is from about 10 to about 35 nucleotides in length. In some instances, the polynucleic acid molecule is from about 10 to about 30 nucleotides in length. In some instances, the polynucleic acid molecule is from about 10 to about 25 nucleotides in length. In some instances, the polynucleic acid molecule is from about 10 to about 20 nucleotides in length. In some instances, the polynucleic acid molecule is from about 15 to about 25 nucleotides in length. In some instances, the polynucleic acid molecule is from about 15 to about 30 nucleotides in length. In some instances, the polynucleic acid molecule is from about 12 to about 30 nucleotides in length.

[0281] In some embodiments, the polynucleic acid molecule comprises a first polynucleotide. In some instances, the polynucleic acid molecule comprises a second polynucleotide. In some instances, the polynucleic acid molecule comprises a first polynucleotide and a second polynucleotide. In some instances, the first polynucleotide is a sense strand or passenger strand. In some instances, the second polynucleotide is an antisense strand or guide strand.

[0282] In some embodiments, the polynucleic acid molecule is a first polynucleotide. In some embodiments, the first polynucleotide is from about 10 to about 50 nucleotides in length. In some instances, the first polynucleotide is from about 10 to about 30, from about 15 to about 30, from about 18 to about 25, from about 18 to about 24, from about 19 to about 23, or from about 20 to about 22 nucleotides in length.

[0283] In some instances, the first polynucleotide is about 50 nucleotides in length. In some instances, the first polynucleotide is about 45 nucleotides in length. In some instances, the first polynucleotide is about 40 nucleotides in length. In some instances, the first polynucleotide is about 35 nucleotides in length. In some instances, the first polynucleotide is about 30 nucleotides in length. In some instances, the first polynucleotide is about 25 nucleotides in length. In some instances, the first polynucleotide is about 20 nucleotides in length. In some instances, the first polynucleotide is about 19 nucleotides in length. In some instances, the first polynucleotide is about 18 nucleotides in length. In some instances, the first polynucleotide is about 17 nucleotides in length. In some instances, the first polynucleotide is about 16 nucleotides in length. In some instances, the first polynucleotide is about 15 nucleotides in length. In some instances, the first polynucleotide is about 14 nucleotides in length. In some instances, the first polynucleotide is about 13 nucleotides in length. In some instances, the first polynucleotide is about 12 nucleotides in length. In some instances, the first polynucleotide is about 11 nucleotides in length. In some instances, the first polynucleotide is about 10 nucleotides in length. In some instances, the first polynucleotide is from about 10 to about 50 nucleotides in length. In some instances, the first polynucleotide is from about 10 to about 45 nucleotides in length. In some instances, the first polynucleotide is from about 10 to about 40 nucleotides in length. In some instances, the first polynucleotide is from about 10 to about 35 nucleotides in length. In some instances, the first polynucleotide is from about 10 to about 30 nucleotides in length. In some instances, the first polynucleotide is from about 10 to about 25 nucleotides in length. In some instances, the first polynucleotide is from about 10 to about 20 nucleotides in length. In some instances, the first polynucleotide is from about 15 to about 25 nucleotides in length. In some instances, the first polynucleotide is from about 15 to about 30 nucleotides in length. In some instances, the first polynucleotide is from about 12 to about 30 nucleotides in length.

[0284] In some embodiments, the polynucleic acid molecule is a second polynucleotide. In some embodiments, the second polynucleotide is from about 10 to about 50 nucleotides in length. In some instances, the second polynucleotide is from about 10 to about 30, from about 15 to about 30, from about 18 to about 25, from about 18 to about 24, from about 19 to about 23, or from about 20 to about 22 nucleotides in length.

[0285] In some instances, the second polynucleotide is about 50 nucleotides in length. In some instances, the second polynucleotide is about 45 nucleotides in length. In some instances, the second polynucleotide is about 40 nucleotides in length. In some instances, the second polynucleotide is about 35 nucleotides in length. In some instances, the second polynucleotide is about 30 nucleotides in length. In some instances, the second polynucleotide is about 25 nucleotides in length. In some instances, the second polynucleotide is about 20 nucleotides in length. In some instances, the second polynucleotide is about 19 nucleotides in length. In some instances, the second polynucleotide is about 18 nucleotides in length. In some instances, the second polynucleotide is about 17 nucleotides in length. In some instances, the second polynucleotide is about 16 nucleotides in length. In some instances, the second polynucleotide is about 15 nucleotides in length. In some instances, the second polynucleotide is about 14 nucleotides in length. In some instances, the second polynucleotide is about 13 nucleotides in length. In some instances, the second polynucleotide is about 12 nucleotides in length. In some instances, the second polynucleotide is about 11 nucleotides in length. In some instances, the second polynucleotide is about 10 nucleotides in length. In some instances, the second polynucleotide is from about 10 to about 50 nucleotides in length. In some instances, the second polynucleotide is from about 10 to about 45 nucleotides in length. In some instances, the second polynucleotide is from about 10 to about 40 nucleotides in length. In some instances, the second polynucleotide is from about 10 to about 35 nucleotides in length. In some instances, the second polynucleotide is from about 10 to about 30 nucleotides in length. In some instances, the second polynucleotide is from about 10 to about 25 nucleotides in length. In some instances, the second polynucleotide is from about 10 to about 20 nucleotides in length. In some instances, the second polynucleotide is from about 15 to about 25 nucleotides in length. In some instances, the second polynucleotide is from about 15 to about 30 nucleotides in length. In some instances, the second polynucleotide is from about 12 to about 30 nucleotides in length.

[0286] In some embodiments, the polynucleic acid molecule comprises a first polynucleotide and a second polynucleotide. In some instances, the polynucleic acid molecule further comprises a blunt terminus, an overhang, or a combination thereof. In some instances, the blunt terminus is a 5′ blunt terminus, a 3′ blunt terminus, or both. In some cases, the overhang is a 5′ overhang, 3′ overhang, or both. In some cases, the overhang comprises 1, 2, 3, 4, 5, 6, 7, 8, 9, or 10 non-base pairing nucleotides. In some cases, the overhang comprises 1, 2, 3, 4, 5, or 6 non-base pairing nucleotides. In some cases, the overhang comprises 1, 2, 3, or 4 non-base pairing nucleotides. In some cases, the overhang comprises 1 non-base pairing nucleotide. In some cases, the overhang comprises 2 non-base pairing nucleotides. In some cases, the overhang comprises 3 non-base pairing nucleotides. In some cases, the overhang comprises 4 non-base pairing nucleotides.

[0287] In some embodiments, the sequence of the polynucleic acid molecule is at least 40%, 50%, 55%, 60%, 65%, 70%, 75%, 80%, 85%, 90%, 95%, 98%, 99%, or 99.5% complementary to a target sequence described herein. In some embodiments, the sequence of the polynucleic acid molecule is at least 50% complementary to a target sequence described herein. In some embodiments, the sequence of the polynucleic acid molecule is at least 60% complementary to a target sequence described herein. In some embodiments, the sequence of the polynucleic acid molecule is at least 70% complementary to a target sequence described herein. In some embodiments, the sequence of the polynucleic acid molecule is at least 80% complementary to a target sequence described herein. In some embodiments, the sequence of the polynucleic acid molecule is at least 90% complementary to a target sequence described herein. In some embodiments, the sequence of the polynucleic acid molecule is at least 95% complementary to a target sequence described herein. In some embodiments, the sequence of the polynucleic acid molecule is at least 99% complementary to a target sequence described herein. In some instances, the sequence of the polynucleic acid molecule is 100% complementary to a target sequence described herein.

[0288] In some embodiments, the sequence of the polynucleic acid molecule has 5 or less mismatches to a target sequence described herein. In some embodiments, the sequence of the polynucleic acid molecule has 4 or less mismatches to a target sequence described herein. In some instances, the sequence of the polynucleic acid molecule may has 3 or less mismatches to a target sequence described herein. In some cases, the sequence of the polynucleic acid molecule may has 2 or less mismatches to a target sequence described herein. In some cases, the sequence of the polynucleic acid molecule may has 1 or less mismatches to a target sequence described herein.

[0289] In some embodiments, the specificity of the polynucleic acid molecule that hybridizes to a target sequence described herein is a 95%, 98%, 99%, 99.5%, or 100% sequence complementarity of the polynucleic acid molecule to a target sequence. In some instances, the hybridization is a high stringent hybridization condition.

[0290] In some embodiments, the polynucleic acid molecule hybridizes to at least 8, 9, 10, 11, 12, 13, 14, 15, 16, 17, 18, 19, 20, or more contiguous bases of a target sequence described herein. In some embodiments, the polynucleic acid molecule hybridizes to at least 8 contiguous bases of a target sequence described herein. In some embodiments, the polynucleic acid molecule hybridizes to at least 9 contiguous bases of a target sequence described herein. In some embodiments, the polynucleic acid molecule hybridizes to at least 10 contiguous bases of a target sequence described herein. In some embodiments, the polynucleic acid molecule hybridizes to at least 11 contiguous bases of a target sequence described herein. In some embodiments, the polynucleic acid molecule hybridizes to at least 12 contiguous bases of a target sequence described herein. In some embodiments, the polynucleic acid molecule hybridizes to at least 13 contiguous bases of a target sequence described herein. In some embodiments, the polynucleic acid molecule hybridizes to at least 14 contiguous bases of a target sequence described herein. In some embodiments, the polynucleic acid molecule hybridizes to at least 15 contiguous bases of a target sequence described herein. In some embodiments, the polynucleic acid molecule hybridizes to at least 16 contiguous bases of a target sequence described herein. In some embodiments, the polynucleic acid molecule hybridizes to at least 17 contiguous bases of a target sequence described herein. In some embodiments, the polynucleic acid molecule hybridizes to at least 18 contiguous bases of a target sequence described herein. In some embodiments, the polynucleic acid molecule hybridizes to at least 19 contiguous bases of a target sequence described herein. In some embodiments, the polynucleic acid molecule hybridizes to at least 20 contiguous bases of a target sequence described herein.

[0291] In some embodiments, the polynucleic acid molecule has reduced off-target effect. In some instances, “off-target” or “off-target effects” refer to any instance in which a polynucleic acid polymer directed against a given target causes an unintended effect by interacting either directly or indirectly with another mRNA sequence, a DNA sequence or a cellular protein or other moiety. In some instances, an “off-target effect” occurs when there is a simultaneous degradation of other transcripts due to partial homology or complementarity between that other transcript and the sense and/or antisense strand of the polynucleic acid molecule.

[0292] In some embodiments, the polynucleic acid molecule comprises natural, synthetic, or artificial nucleotide analogues or bases. In some cases, the polynucleic acid molecule comprises combinations of DNA, RNA and/or nucleotide analogues. In some instances, the synthetic or artificial nucleotide analogues or bases comprise modifications at one or more of ribose moiety, phosphate moiety, nucleoside moiety, or a combination thereof.

[0293] In some embodiments, a nucleotide analogue or artificial nucleotide base described above comprises a nucleic acid with a modification at a 2′ hydroxyl group of the ribose moiety. In some instances, the modification includes an H, OR, R, halo, SH, SR, NH2, NHR, NR2, or CN, wherein R is an alkyl moiety. Exemplary alkyl moiety includes, but is not limited to, halogens, sulfurs, thiols, thioethers, thioesters, amines (primary, secondary, or tertiary), amides, ethers, esters, alcohols and oxygen. In some instances, the alkyl moiety further comprises a modification. In some instances, the modification comprises an azo group, a keto group, an aldehyde group, a carboxyl group, a nitro group, a nitroso, group, a nitrile group, a heterocycle (e.g., imidazole, hydrazino or hydroxylamino) group, an isocyanate or cyanate group, or a sulfur containing group (e.g., sulfoxide, sulfone, sulfide, or disulfide). In some instances, the alkyl moiety further comprises a hetero substitution. In some instances, the carbon of the heterocyclic group is substituted by a nitrogen, oxygen or sulfur. In some instances, the heterocyclic substitution includes but is not limited to, morpholino, imidazole, and pyrrolidino.

[0294] In some instances, the modification at the 2′ hydroxyl group is a 2′-O-methyl modification or a 2′-O-methoxyethyl (2′-O-MOE) modification. In some cases, the 2′-O-methyl modification adds a methyl group to the 2′ hydroxyl group of the ribose moiety whereas the 2′O-methoxyethyl modification adds a methoxyethyl group to the 2′ hydroxyl group of the ribose moiety. Exemplary chemical structures of a 2′-O-methyl modification of an adenosine molecule and 2′O-methoxyethyl modification of an uridine are illustrated below.

[chemical structure]

[0295] In some instances, the modification at the 2′ hydroxyl group is a 2′-O-aminopropyl modification in which an extended amine group comprising a propyl linker binds the amine group to the 2′ oxygen. In some instances, this modification neutralizes the phosphate-derived overall negative charge of the oligonucleotide molecule by introducing one positive charge from the amine group per sugar and thereby improves cellular uptake properties due to its zwitterionic properties. An exemplary chemical structure of a 2′-O-aminopropyl nucleoside phosphoramidite is illustrated below.

[chemical structure]

[0296] In some instances, the modification at the 2′ hydroxyl group is a locked or bridged ribose modification (e.g., locked nucleic acid or LNA) in which the oxygen molecule bound at the 2′ carbon is linked to the 4′ carbon by a methylene group, thus forming a 2′-C,4′-C-oxy-methylene-linked bicyclic ribonucleotide monomer. Exemplary representations of the chemical structure of LNA are illustrated below. The representation shown to the left highlights the chemical connectivities of an LNA monomer. The representation shown to the right highlights the locked 3′-endo (³E) conformation of the furanose ring of an LNA monomer.

[chemical structure]

[0297] In some instances, the modification at the 2′ hydroxyl group comprises ethylene nucleic acids (ENA) such as for example 2′-4′-ethylene-bridged nucleic acid, which locks the sugar conformation into a C₃′-endo sugar puckering conformation. ENA are part of the bridged nucleic acids class of modified nucleic acids that also comprises LNA. Exemplary chemical structures of the ENA and bridged nucleic acids are illustrated below.

[chemical structure]

[0298] In some embodiments, additional modifications at the 2′ hydroxyl group include 2′-deoxy, T-deoxy-2′-fluoro, 2′-O-aminopropyl (2′-O-AP), 2′-O-dimethylaminoethyl (2′-O-DMAOE), 2′-O-dimethylaminopropyl (2′-O-DMAP), T-O-dimethylaminoethyloxyethyl (2′-O-DMAEOE), or 2′-O—N-methylacetamido (2′-O-NMA).

[0299] In some embodiments, a nucleotide analogue comprises a modified base such as, but not limited to, 5-propynyluridine, 5-propynylcytidine, 6-methyladenine, 6-methylguanine, N, N,-dimethyladenine, 2-propyladenine, 2propylguanine, 2-aminoadenine, 1-methylinosine, 3-methyluridine, 5-methylcytidine, 5-methyluridine and other nucleotides having a modification at the 5 position, 5-(2-amino) propyl uridine, 5-halocytidine, 5-halouridine, 4-acetylcytidine, 1-methyladenosine, 2-methyladenosine, 3-methylcytidine, 6-methyluridine, 2-methylguanosine, 7-methylguanosine, 2,2-dimethylguanosine, 5-methylaminoethyluridine, 5-methyloxyuridine, deazanucleotides (such as 7-deaza-adenosine, 6-azouridine, 6-azocytidine, or 6-azothymidine), 5-methyl-2-thiouridine, other thio bases (such as 2-thiouridine, 4-thiouridine, and 2-thiocytidine), dihydrouridine, pseudouridine, queuosine, archaeosine, naphthyl and substituted naphthyl groups, any O- and N-alkylated purines and pyrimidines (such as N6-methyladenosine, 5-methylcarbonylmethyluridine, uridine 5-oxyacetic acid, pyridine-4-one, or pyridine-2-one), phenyl and modified phenyl groups such as aminophenol or 2,4,6-trimethoxy benzene, modified cytosines that act as G-clamp nucleotides, 8-substituted adenines and guanines, 5-substituted uracils and thymines, azapyrimidines, carboxyhydroxyalkyl nucleotides, carboxyalkylaminoalkyi nucleotides, and alkylcarbonylalkylated nucleotides. Modified nucleotides also include those nucleotides that are modified with respect to the sugar moiety, as well as nucleotides having sugars or analogs thereof that are not ribosyl. For example, the sugar moieties, in some cases are or are based on, mannoses, arabinoses, glucopyranoses, galactopyranoses, 4′-thioribose, and other sugars, heterocycles, or carbocycles. The term nucleotide also includes what are known in the art as universal bases. By way of example, universal bases include but are not limited to 3-nitropyrrole, 5-nitroindole, or nebularine.

[0300] In some embodiments, a nucleotide analogue further comprises a morpholino, a peptide nucleic acid (PNA), a methylphosphonate nucleotide, a thiolphosphonate nucleotide, a 2′-fluoro N3-P5′-phosphoramidite, or a 1′,5′-anhydrohexitol nucleic acid (HNA). Morpholino or phosphorodiamidate morpholino oligo (PMO) comprises synthetic molecules whose structure mimics natural nucleic acid structure but deviates from the normal sugar and phosphate structures. In some instances, the five member ribose ring is substituted with a six member morpholino ring containing four carbons, one nitrogen, and one oxygen. In some cases, the ribose monomers are linked by a phosphordiamidate group instead of a phosphate group. In such cases, the backbone alterations remove all positive and negative charges making morpholinos neutral molecules capable of crossing cellular membranes without the aid of cellular delivery agents such as those used by charged oligonucleotides.

[chemical structure]

[0301] In some embodiments, a morpholino or PMO described above is a PMO comprising a positive or cationic charge. In some instances, the PMO is PMOplus (Sarepta). PMOplus refers to phosphorodiamidate morpholino oligomers comprising any number of (1-piperazino)phosphinyideneoxy, (1-(4-(omega-guanidino-alkanoyl))-piperazino)phosphinylideneoxy linkages (e.g., as such those described in PCT Publication No. WO2008/036127. In some cases, the PMO is a PMO described in U.S. Pat. No. 7,943,762.

[0302] In some embodiments, a morpholino or PMO described above is a PMO-X (Sarepta). In some cases, PMO-X refers to phosphorodiamidate morpholino oligomers comprising at least one linkage or at least one of the disclosed terminal modifications, such as those disclosed in PCT Publication No. WO2011/150408 and U.S. Publication No. 2012/0065169.

[0303] In some embodiments, a morpholino or PMO described above is a PMO as described in Table 5 of U.S. Publication No. 2014/0296321.

[0304] In some embodiments, peptide nucleic acid (PNA) does not contain sugar ring or phosphate linkage and the bases are attached and appropriately spaced by oligoglycine-like molecules, therefore, eliminating a backbone charge.

[chemical structure]

[0305] In some embodiments, one or more modifications optionally occur at the internucleotide linkage. In some instances, modified internucleotide linkage includes, but is not limited to, phosphorothioates; phosphorodithioates; methylphosphonates; 5′-alkylenephosphonates; 5′-methylphosphonate; 3′-alkylene phosphonates; borontrifluoridates; borano phosphate esters and selenophosphates of 3′-5′linkage or 2′-5′linkage; phosphotriesters; thionoalkylphosphotriesters; hydrogen phosphonate linkages; alkyl phosphonates; alkylphosphonothioates; arylphosphonothioates; phosphoroselenoates; phosphorodiselenoates; phosphinates; phosphoramidates; 3′-alkylphosphoramidates; aminoalkylphosphoramidates; thionophosphoramidates; phosphoropiperazidates; phosphoroanilothioates; phosphoroanilidates; ketones; sulfones; sulfonamides; carbonates; carbamates; methylenehydrazos; methylenedimethylhydrazos; formacetals; thioformacetals; oximes; methyleneiminos; methylenemethyliminos; thioamidates; linkages with riboacetyl groups; aminoethyl glycine; silyl or siloxane linkages; alkyl or cycloalkyl linkages with or without heteroatoms of, for example, 1 to 10 carbons that are saturated or unsaturated and/or substituted and/or contain heteroatoms; linkages with morpholino structures, amides, or polyamides wherein the bases are attached to the aza nitrogens of the backbone directly or indirectly; and combinations thereof.

[0306] In some instances, the modification is a methyl or thiol modification such as methylphosphonate or thiolphosphonate modification. Exemplary thiolphosphonate nucleotide (left) and methylphosphonate nucleotide (right) are illustrated below.

[chemical structure]

[0307] In some instances, a modified nucleotide includes, but is not limited to, 2′-fluoro N3-P5′-phosphoramidites illustrated as:

[chemical structure]

[0308] In some instances, a modified nucleotide includes, but is not limited to, hexitol nucleic acid (or 1′,5′-anhydrohexitol nucleic acids (HNA)) illustrated as:

[chemical structure]

[0309] In some embodiments, one or more modifications comprise a modified phosphate backbone in which the modification generates a neutral or uncharged backbone. In some instances, the phosphate backbone is modified by alkylation to generate an uncharged or neutral phosphate backbone. As used herein, alkylation includes methylation, ethylation, and propylation. In some cases, an alkyl group, as used herein in the context of alkylation, refers to a linear or branched saturated hydrocarbon group containing from 1 to 6 carbon atoms. In some instances, exemplary alkyl groups include, but are not limited to, methyl, ethyl, n-propyl, isopropyl, n-butyl, isobutyl, sec-butyl, tert-butyl, n-pentyl, isopentyl, neopentyl, hexyl, isohexyl, 1,1-dimethylbutyl, 2,2-dimethylbutyl, 3,3-dimethylbutyl, and 2-ethylbutyl groups. In some cases, a modified phosphate is a phosphate group as described in U.S. Pat. No. 9,481,905.

[0310] In some embodiments, additional modified phosphate backbones comprise methylphosphonate, ethylphosphonate, methylthiophosphonate, or methoxyphosphonate. In some cases, the modified phosphate is methylphosphonate. In some cases, the modified phosphate is ethylphosphonate. In some cases, the modified phosphate is methylthiophosphonate. In some cases, the modified phosphate is methoxyphosphonate.

[0311] In some embodiments, one or more modifications further optionally include modifications of the ribose moiety, phosphate backbone and the nucleoside, or modifications of the nucleotide analogues at the 3′ or the 5′ terminus. For example, the 3′ terminus optionally include a 3′ cationic group, or by inverting the nucleoside at the 3′-terminus with a 3′-3′ linkage. In another alternative, the 3′-tenninus is optionally conjugated with an aminoalkyl group, e.g., a 3′ C5-aminoalkyl dT. In an additional alternative, the 3′-terminus is optionally conjugated with an abasic site, e.g, with an apurinic or apyrimidinic site. In some instances, the 5′-terminus is conjugated with an aminoalkyl group, e.g., a 5′-O-alkylamino substituent. In some cases, the 5-terminus is conjugated with an abasic site, e.g., with an apurinic or apyrimidinic site.

[0312] In some embodiments, the polynucleic acid molecule comprises one or more of the artificial nucleotide analogues described herein. In some instances, the polynucleic acid molecule comprises 1, 2, 3, 4, 5, 6, 7, 8, 9, 10, 11, 12, 13, 14, 15, 16, 17, 18, 20, 25, or more of the artificial nucleotide analogues described herein. In some embodiments, the artificial nucleotide analogues include 2′-O-methyl, 2′-O-methoxyethyl (2′-O-MOE), 2′-O-aminopropyl, 2′-deoxy, T-deoxy-2′-fluoro, 2′-O-aminopropyl (2′-O-AP), 2′-O-dimethylaminoethyl (2′-O-DMAOE), 2′-O-dimethylaminopropyl (2′-O-DMAP), T-O-dimethylaminoethyloxyethyl (2′-O-DMAEOE), or 2′-O—N-methylacetamido (2′-O-NMA) modified, LNA, ENA, PNA, HNA, morpholino, methylphosphonate nucleotides, thiolphosphonate nucleotides, 2′-fluoro N3-P5′-phosphoramidites, or a combination thereof. In some instances, the polynucleic acid molecule comprises 1, 2, 3, 4, 5, 6, 7, 8, 9, 10, 11, 12, 13, 14, 15, 16, 17, 18, 20, 25, or more of the artificial nucleotide analogues selected from 2′-O-methyl, 2′-O-methoxyethyl (2′-O-MOE), 2′-O-aminopropyl, 2′-deoxy, T-deoxy-2′-fluoro, 2-O-aminopropyl (2′-O-AP), 2′-O-dimethylaminoethyl (2′-O-DMAOE), 2′-O-dimethylaminopropyl (2′-O-DMAP), T-O-dimethylaminoethyloxyethyl (2′-O-DMAEOE), or 2′-O—N-methylacetamido (2′-O-NMA) modified, LNA, ENA, PNA, HNA, morpholino, methylphosphonate nucleotides, thiolphosphonate nucleotides, 2′-fluoro N3-P5′-phosphoramidites, or a combination thereof. In some instances, the polynucleic acid molecule comprises 1, 2, 3, 4, 5, 6, 7, 8, 9, 10, 11, 12, 13, 14, 15, 16, 17, 18, 20, 25, or more of 2′-O-methyl modified nucleotides. In some instances, the polynucleic acid molecule comprises 1, 2, 3, 4, 5, 6, 7, 8, 9, 10, 11, 12, 13, 14, 15, 16, 17, 18, 20, 25, or more of 2′-O-methoxyethyl (2′-O-MOE) modified nucleotides. In some instances, the polynucleic acid molecule comprises 1, 2, 3, 4, 5, 6, 7, 8, 9, 10, 11, 12, 13, 14, 15, 16, 17, 18, 20, 25, or more of thiolphosphonate nucleotides.

[0313] In some embodiments, the polynucleic acid molecule comprises at least about 1, about 2, about 3, about 4, about 5, about 6, about 7, about 8, about 9, about 10, about 11, about 12, about 13, about 14, about 15, about 16, about 17, about 18, about 19, about 20, about 21, about 22, or more modifications. In some instances, the polynucleic acid molecule is a polynucleic acid molecule of SEQ ID NOs: 16-75, 452-1955, 1956-1962, 1967-2002, 2013-2032, 2082-2109, or 2117.

[0314] In some instances, the polynucleic acid molecule comprises at least about 1, about 2, about 3, about 4, about 5, about 6, about 7, about 8, about 9, about 10, about 11, about 12, about 13, about 14, about 15, about 16, about 17, about 18, about 19, about 20, about 21, about 22, or more modified nucleotides. In some instances, the polynucleic acid molecule is a polynucleic acid molecule of SEQ ID NOs: 16-75, 452-1955, 1956-1962, 1967-2002, 2013-2032, 2082-2109, or 2117.

[0315] In some instances, the polynucleic acid molecule comprises at least one of: from about 5% to about 100% modification, from about 10% to about 100% modification, from about 20% to about 100% modification, from about 30% to about 100% modification, from about 40% to about 100% modification, from about 50% to about 100% modification, from about 60% to about 100% modification, from about 70% to about 100% modification, from about 80% to about 100% modification, and from about 90% to about 100% modification. In some instances, the polynucleic acid molecule is a polynucleic acid molecule of SEQ ID NOs: 16-75, 452-1955, 1956-1962, 1967-2002, 2013-2032, 2082-2109, or 2117.

[0316] In some instances, about 5 to about 100% of the polynucleic acid molecule comprise the artificial nucleotide analogues described herein. In some instances, about 5%, 10%, 15%, 20%, 25%, 30%, 35%, 40%, 45%, 50%, 55%, 60%, 65%, 70%, 75%, 80%, 85%, 90%, 95%, or 100% of the polynucleic acid molecule comprise the artificial nucleotide analogues described herein. In some instances, about 5%, 10%, 15%, 20%, 25%, 30%, 35%, 40%, 45%, 50%, 55%, 60%, 65%, 70%, 75%, 80%, 85%, 90%, 95%, or 100% of a polynucleic acid molecule of SEQ ID NOs: 16-75, 452-1955, 1956-1962, 1967-2002, 2013-2032, 2082-2109, or 2117 comprise the artificial nucleotide analogues described herein. In some instances, about 5%, 10%, 15%, 20%, 25%, 30%, 35%, 40%, 45%, 50%, 55%, 60%, 65%, 70%, 75%, 80%, 85%, 90%, 95%, or 100% of a polynucleic acid molecule of SEQ ID NOs: 16-45 comprise the artificial nucleotide analogues described herein. In some instances, about 5%, 10%, 15%, 20%, 25%, 30%, 35%, 40%, 45%, 50%, 55%, 60%, 65%, 70%, 75%, 80%, 85%, 90%, 95%, or 100% of a polynucleic acid molecule of SEQ ID NOs: 452-1203 comprise the artificial nucleotide analogues described herein. In some instances, about 5%, 10%, 15%, 20%, 25%, 30%, 35% 40%, 45%, 50%, 55%, 60%, 65%, 70%, 75%, 80%, 85%, 90%, 95%, or 100% of a polynucleic acid molecule of SEQ ID NOs: 1956-1962 comprise the artificial nucleotide analogues described herein. In some instances, about 5%, 10%, 15%, 20%, 25%, 30%, 35%, 40%, 45%, 50%, 55%, 60%, 65%, 70%, 75%, 80%, 85%, 90%, 95%, or 100% of a polynucleic acid molecule of SEQ ID NOs: 1967-2002 comprise the artificial nucleotide analogues described herein. In some instances, about 5%, 10%, 15%, 20%, 25%, 30%, 35%, 40%, 45%, 50%, 55%, 60%, 65%, 70%, 75%, 80%, 85%, 90%, 95%, or 100% of a polynucleic acid molecule of SEQ ID NOs: 2013-2032 comprise the artificial nucleotide analogues described herein. In some instances, about 5%, 10%, 15%, 20%, 25%, 30%, 35%, 40%, 45%, 50%, 55%, 60%, 65%, 70%, 75%, 80%, 85%, 90%, 95%, or 100% of a polynucleic acid molecule of SEQ ID NOs: 2082-2109 or 2117 comprise the artificial nucleotide analogues described herein. In some embodiments, the artificial nucleotide analogues include 2′-O-methyl, 2′-O-methoxyethyl (2′-O-MOE), 2′-O-aminopropyl, 2′-deoxy, T-deoxy-2′-fluoro, 2′-O-aminopropyl (2′-O-AP), 2′-O-dimethylaminoethyl (2′-O-DMAOE), 2′-O-dimethylaminopropyl (2′-O-DMAP), T-O-dimethylaminoethyloxyethyl (2′-O-DMAEOE), or 2′-O—N-methylacetamido (2′-O-NMA) modified, LNA, ENA, PNA, HNA, morpholino, methylphosphonate nucleotides, thiolphosphonate nucleotides, 2′-fluoro N3-P5′-phosphoramidites, or a combination thereof.

[0317] In some instances, the polynucleic acid molecule that comprises an artificial nucleotide analogue comprises SEQ ID NOs: 46-75. In some instances, the polynucleic acid molecule that comprises an artificial nucleotide analogue comprises SEQ ID NOs: 1204-1955. In some instances, the polynucleic acid molecule that comprises an artificial nucleotide analogue comprises SEQ ID NOs: 1967-2002. In some instances, the polynucleic acid molecule that comprises an artificial nucleotide analogue comprises SEQ ID NOs: 2013-2032. In some instances, the polynucleic acid molecule that comprises an artificial nucleotide analogue comprises SEQ ID NOs: 2082-2109 or 2117.

[0318] In some cases, one or more of the artificial nucleotide analogues described herein are resistant toward nucleases such as for example ribonuclease such as RNase H, deoxyribunuclease such as DNase, or exonuclease such as 5′-3′ exonuclease and 3′-5′ exonuclease when compared to natural polynucleic acid molecules. In some instances, artificial nucleotide analogues comprising 2′-O-methyl, 2′-O-methoxyethyl (2′-O-MOE), 2′-O-aminopropyl, 2′-deoxy, T-deoxy-2′-fluoro, 2′-O-aminopropyl (2′-O-AP), 2′-O-dimethylaminoethyl (2′-O-DMAOE), 2′-O-dimethylaminopropyl (2′-O-DMAP), T-O-dimethylaminoethyloxyethyl (2′-O-DMAEOE), or 2′-O—N-methylacetamido (2′-O-NMA) modified, LNA, ENA, PNA, HNA, morpholino, methylphosphonate nucleotides, thiolphosphonate nucleotides, 2′-fluoro N3-P5′-phosphoramidites, or combinations thereof are resistant toward nucleases such as for example ribonuclease such as RNase H, deoxyribunuclease such as DNase, or exonuclease such as 5′-3′ exonuclease and 3′-5′ exonuclease. In some instances, 2′-O-methyl modified polynucleic acid molecule is nuclease resistant (e.g., RNase H, DNase, 5′-3′ exonuclease or 3′-5′ exonuclease resistant). In some instances, 2′O-methoxyethyl (2′-O-MOE) modified polynucleic acid molecule is nuclease resistant (e.g., RNase H, DNase, 5′-3′ exonuclease or 3′-5′ exonuclease resistant). In some instances, 2′-O-aminopropyl modified polynucleic acid molecule is nuclease resistant (e.g., RNase H, DNase, 5′-3′ exonuclease or 3′-5′ exonuclease resistant). In some instances, 2′-deoxy modified polynucleic acid molecule is nuclease resistant (e.g., RNase H, DNase, 5′-3′ exonuclease or 3′-5′ exonuclease resistant). In some instances, T-deoxy-2′-fluoro modified polynucleic acid molecule is nuclease resistant (e.g., RNase H, DNase, 5′-3′ exonuclease or 3′-5′ exonuclease resistant). In some instances, 2′-O-aminopropyl (2′-O-AP) modified polynucleic acid molecule is nuclease resistant (e.g., RNase H, DNase, 5′-3′ exonuclease or 3′-5′ exonuclease resistant). In some instances, 2′-O-dimethylaminoethyl (2′-O-DMAOE) modified polynucleic acid molecule is nuclease resistant (e.g., RNase H, DNase, 5′-3′ exonuclease or 3′-5′ exonuclease resistant). In some instances, 2′-O-dimethylaminopropyl (2′-O-DMAP) modified polynucleic acid molecule is nuclease resistant (e.g., RNase H, DNase, 5′-3′ exonuclease or 3′-5′ exonuclease resistant). In some instances, T-O-dimethylaminoethyloxyethyl (2′-O-DMAEOE) modified polynucleic acid molecule is nuclease resistant (e.g., RNase H, DNase, 5′-3′ exonuclease or 3′-5′ exonuclease resistant). In some instances, 2′-O—N-methylacetamido (2′-O-NMA) modified polynucleic acid molecule is nuclease resistant (e.g., RNase H, DNase, 5′-3′ exonuclease or 3′-5′ exonuclease resistant). In some instances, LNA-modified polynucleic acid molecule is nuclease resistant (e.g., RNase H, DNase, 5′-3′ exonuclease or 3′-5′ exonuclease resistant). In some instances, ENA-modified polynucleic acid molecule is nuclease resistant (e.g., RNase H, DNase, 5′-3′ exonuclease or 3′-5′ exonuclease resistant). In some instances, HNA-modified polynucleic acid molecule is nuclease resistant (e.g., RNase H, DNase, 5′-3′ exonuclease or 3′-5′ exonuclease resistant). Morpholinos may be nuclease resistant (e.g., RNase H, DNase, 5′-3′ exonuclease or 3′-5′ exonuclease resistant). In some instances, PNA-modified polynucleic acid molecule is resistant to nucleases (e.g., RNase H, DNase, 5′-3′ exonuclease or 3′-5′ exonuclease resistant). In some instances, methylphosphonate nucleotide-modified polynucleic acid molecule is nuclease resistant (e.g., RNase H, DNase, 5′-3′ exonuclease or 3′-5′ exonuclease resistant). In some instances, thiolphosphonate nucleotide-modified polynucleic acid molecule is nuclease resistant (e.g., RNase H, DNase, 5′-3′ exonuclease or 3′-5′ exonuclease resistant). In some instances, polynucleic acid molecule comprising 2′-fluoro N3-P5′-phosphoramidites is nuclease resistant (e.g., RNase H, DNase, 5′-3′ exonuclease or 3′-5′ exonuclease resistant). In some instances, the 5′conjugates described herein inhibit 5′-3′ exonucleolytic cleavage. In some instances, the 3′ conjugates described herein inhibit 3′-5′ exonucleolytic cleavage.

[0319] In some embodiments, one or more of the artificial nucleotide analogues described herein have increased binding affinity toward their mRNA target relative to an equivalent natural polynucleic acid molecule. The one or more of the artificial nucleotide analogues comprising 2′-O-methyl, 2′-O-methoxyethyl (2′-O-MOE), 2′-O-aminopropyl, 2′-deoxy, T-deoxy-2′-fluoro, 2′-O-aminopropyl (2′-O-AP), 2′-O-dimethylaminoethyl (2′-O-DMAOE), 2′-O-dimethylaminopropyl (2′-O-DMAP), T-O-dimethylaminoethyloxyethyl (2′-O-DMAEOE), or 2′-O—N-methylacetamido (2′-O-NMA) modified, LNA, ENA, PNA, HNA, morpholino, methylphosphonate nucleotides, thiolphosphonate nucleotides, or 2′-fluoro N3-P5′-phosphoramidites can have increased binding affinity toward their mRNA target relative to an equivalent natural polynucleic acid molecule. In some instances, 2′-O-methyl modified polynucleic acid molecule has increased binding affinity toward their mRNA target relative to an equivalent natural polynucleic acid molecule. In some instances, 2′-O-methoxyethyl (2′-O-MOE) modified polynucleic acid molecule has increased binding affinity toward their mRNA target relative to an equivalent natural polynucleic acid molecule. In some instances, 2′-O-aminopropyl modified polynucleic acid molecule has increased binding affinity toward their mRNA target relative to an equivalent natural polynucleic acid molecule. In some instances, 2′-deoxy modified polynucleic acid molecule has increased binding affinity toward their mRNA target relative to an equivalent natural polynucleic acid molecule. In some instances, T-deoxy-2′-fluoro modified polynucleic acid molecule has increased binding affinity toward their mRNA target relative to an equivalent natural polynucleic acid molecule. In some instances, 2′-O-aminopropyl (2′-O-AP) modified polynucleic acid molecule has increased binding affinity toward their mRNA target relative to an equivalent natural polynucleic acid molecule. In some instances, 2-O-dimethylaminoethyl (2′-O-DMAOE) modified polynucleic acid molecule has increased binding affinity toward their mRNA target relative to an equivalent natural polynucleic acid molecule. In some instances, 2′-O-dimethylaminopropyl (2′-O-DMAP) modified polynucleic acid molecule has increased binding affinity toward their mRNA target relative to an equivalent natural polynucleic acid molecule. In some instances, T-O-dimethylaminoethyloxyethyl (2′-O-DMAEOE) modified polynucleic acid molecule has increased binding affinity toward their mRNA target relative to an equivalent natural polynucleic acid molecule. In some instances, 2′-O—N-methylacetamido (2′-O-NMA) modified polynucleic acid molecule has increased binding affinity toward their mRNA target relative to an equivalent natural polynucleic acid molecule. In some instances, LNA-modified polynucleic acid molecule has increased binding affinity toward their mRNA target relative to an equivalent natural polynucleic acid molecule. In some instances, ENA-modified polynucleic acid molecule has increased binding affinity toward their mRNA target relative to an equivalent natural polynucleic acid molecule. In some instances, PNA-modified polynucleic acid molecule has increased binding affinity toward their mRNA target relative to an equivalent natural polynucleic acid molecule. In some instances, HNA-modified polynucleic acid molecule has increased binding affinity toward their mRNA target relative to an equivalent natural polynucleic acid molecule. In some instances, morpholino-modified polynucleic acid molecule has increased binding affinity toward their mRNA target relative to an equivalent natural polynucleic acid molecule. In some instances, methylphosphonate nucleotide-modified polynucleic acid molecule has increased binding affinity toward their mRNA target relative to an equivalent natural polynucleic acid molecule. In some instances, thiolphosphonate nucleotide-modified polynucleic acid molecule has increased binding affinity toward their mRNA target relative to an equivalent natural polynucleic acid molecule. In some instances, polynucleic acid molecule comprising 2′-fluoro N3-P5′-phosphoramidites has increased binding affinity toward their mRNA target relative to an equivalent natural polynucleic acid molecule. In some cases, the increased affinity is illustrated with a lower Kd, a higher melt temperature (Tm), or a combination thereof.

[0320] In some embodiments, a polynucleic acid molecule described herein is a chirally pure (or stereo pure) polynucleic acid molecule, or a polynucleic acid molecule comprising a single enantiomer. In some instances, the polynucleic acid molecule comprises L-nucleotide. In some instances, the polynucleic acid molecule comprises D-nucleotides. In some instance, a polynucleic acid molecule composition comprises less than 30%, 25%, 20%, 15%, 10%, 5%, 4%, 3%, 2%, 1%, or less of its mirror enantiomer. In some cases, a polynucleic acid molecule composition comprises less than 30%, 25%, 20%, 15%, 10%, 5%, 4%, 3%, 2%, 1%, or less of a racemic mixture. In some instances, the polynucleic acid molecule is a polynucleic acid molecule described in: U.S. Patent Publication Nos: 2014/194610 and 2015/211006; and PCT Publication No.: WO2015107425.

[0321] In some embodiments, a polynucleic acid molecule described herein is further modified to include an aptamer-conjugating moiety. In some instances, the aptamer conjugating moiety is a DNA aptamer-conjugating moiety. In some instances, the aptamer-conjugating moiety is Alphamer (Centauri Therapeutics), which comprises an aptamer portion that recognizes a specific cell-surface target and a portion that presents a specific epitopes for attaching to circulating antibodies. In some instance, a polynucleic acid molecule described herein is further modified to include an aptamer-conjugating moiety as described in: U.S. Pat. Nos. 8,604,184, 8,591,910, and 7,850,975.

[0322] In additional embodiments, a polynucleic acid molecule described herein is modified to increase its stability. In some embodiment, the polynucleic acid molecule is RNA (e.g., siRNA), the polynucleic acid molecule is modified to increase its stability. In some instances, the polynucleic acid molecule is modified by one or more of the modifications described above to increase its stability. In some cases, the polynucleic acid molecule is modified at the 2′ hydroxyl position, such as by 2′-O-methyl, 2′-O-methoxyethyl (2′-O-MOE), 2′-O-aminopropyl, 2′-deoxy, T-deoxy-2′-fluoro, 2′-O-aminopropyl (2′-O-AP), 2′-O-dimethylaminoethyl (2′-O-DMAOE), 2′-O-dimethylaminopropyl (2′-O-DMAP), T-O-dimethylaminoethyloxyethyl (2′-O-DMAEOE), or 2′-O—N-methylacetamido (2′-O-NMA) modification or by a locked or bridged ribose conformation (e.g., LNA or ENA). In some cases, the polynucleic acid molecule is modified by 2′-O-methyl and/or 2′-O-methoxyethyl ribose. In some cases, the polynucleic acid molecule also includes morpholinos, PNAs, HNA, methylphosphonate nucleotides, thiolphosphonate nucleotides, and/or 2′-fluoro N3-P5′-phosphoramidites to increase its stability. In some instances, the polynucleic acid molecule is a chirally pure (or stereo pure) polynucleic acid molecule. In some instances, the chirally pure (or stereo pure) polynucleic acid molecule is modified to increase its stability. Suitable modifications to the RNA to increase stability for delivery will be apparent to the skilled person.

[0323] In some embodiments, a polynucleic acid molecule described herein has RNAi activity that modulates expression of RNA encoded by a gene described supra. In some instances, a polynucleic acid molecule described herein is a double-stranded siRNA molecule that down-regulates expression of a gene, wherein one of the strands of the double-stranded siRNA molecule comprises a nucleotide sequence that is complementary to a nucleotide sequence of the gene or RNA encoded by the gene or a portion thereof, and wherein the second strand of the double-stranded siRNA molecule comprises a nucleotide sequence substantially similar to the nucleotide sequence of the gene or RNA encoded by the gene or a portion thereof. In some cases, a polynucleic acid molecule described herein is a double-stranded siRNA molecule that down-regulates expression of a gene, wherein each strand of the siRNA molecule comprises about 15 to 25, 18 to 24, or 19 to about 23 nucleotides, and wherein each strand comprises at least about 14, 17, or 19 nucleotides that are complementary to the nucleotides of the other strand. In some cases, a polynucleic acid molecule described herein is a double-stranded siRNA molecule that down-regulates expression of a gene, wherein each strand of the siRNA molecule comprises about 19 to about 23 nucleotides, and wherein each strand comprises at least about 19 nucleotides that are complementary to the nucleotides of the other strand. In some instances, the gene is KRAS, EGFR, AR, HPRT1, CNNTB1 (β-catenin), or β-catenin associated genes.

[0324] In some embodiments, a polynucleic acid molecule described herein is constructed using chemical synthesis and/or enzymatic ligation reactions using procedures known in the art. For example, a polynucleic acid molecule is chemically synthesized using naturally occurring nucleotides or variously modified nucleotides designed to increase the biological stability of the molecules or to increase the physical stability of the duplex formed between the polynucleic acid molecule and target nucleic acids. Exemplary methods include those described in: U.S. Pat. Nos. 5,142,047; 5,185,444; 5,889,136; 6,008,400; and 6,111,086; PCT Publication No. WO2009099942; or European Publication No. 1579015. Additional exemplary methods include those described in: Griffey et al., “2′-O-aminopropyl ribonucleotides: a zwitterionic modification that enhances the exonuclease resistance and biological activity of antisense oligonucleotides,” J. Med. Chem. 39(26):5100-5109 (1997)); Obika, et al. “Synthesis of 2′-0,4′-C-methyleneuridine and -cytidine. Novel bicyclic nucleosides having a fixed C3, -endo sugar puckering”. Tetrahedron Letters 38 (50): 8735 (1997); Koizumi, M. “ENA oligonucleotides as therapeutics”. Current opinion in molecular therapeutics 8 (2): 144-149 (2006); and Abramova et al., “Novel oligonucleotide analogues based on morpholino nucleoside subunits-antisense technologies: new chemical possibilities,” Indian Journal of Chemistry 48B:1721-1726 (2009). Alternatively, the polynucleic acid molecule is produced biologically using an expression vector into which a polynucleic acid molecule has been subcloned in an antisense orientation (i.e., RNA transcribed from the inserted polynucleic acid molecule will be of an antisense orientation to a target polynucleic acid molecule of interest).

### Conjugation Chemistry

[0325] In some embodiments, a polynucleic acid molecule is conjugated to a binding moiety. In some instances, the binding moiety comprises amino acids, peptides, polypeptides, proteins, antibodies, antigens, toxins, hormones, lipids, nucleotides, nucleosides, sugars, carbohydrates, polymers such as polyethylene glycol and polypropylene glycol, as well as analogs or derivatives of all of these classes of substances. Additional examples of binding moiety also include steroids, such as cholesterol, phospholipids, di- and triacylglycerols, fatty acids, hydrocarbons (e.g., saturated, unsaturated, or contains substitutions), enzyme substrates, biotin, digoxigenin, and polysaccharides. In some instances, the binding moiety is an antibody or binding fragment thereof. In some instances, the polynucleic acid molecule is further conjugated to a polymer, and optionally an endosomolytic moiety.

[0326] In some embodiments, the polynucleic acid molecule is conjugated to the binding moiety by a chemical ligation process. In some instances, the polynucleic acid molecule is conjugated to the binding moiety by a native ligation. In some instances, the conjugation is as described in: Dawson, et al. “Synthesis of proteins by native chemical ligation,” Science 1994, 266, 776-779; Dawson, et al. “Modulation of Reactivity in Native Chemical Ligation through the Use of Thiol Additives,” J. Am. Chem. Soc. 1997, 119, 4325-4329; Hackeng, et al. “Protein synthesis by native chemical ligation: Expanded scope by using straightforward methodology.,” Proc. Natl. Acad. Sci. USA 1999, 96, 10068-10073; or Wu, et al. “Building complex glycopeptides: Development of a cysteine-free native chemical ligation protocol,” Angew. Chem. Int. Ed. 2006, 45, 4116-4125. In some instances, the conjugation is as described in U.S. Pat. No. 8,936,910. In some embodiments, the polynucleic acid molecule is conjugated to the binding moiety either site-specifically or non-specifically via native ligation chemistry.

[0327] In some instances, the polynucleic acid molecule is conjugated to the binding moiety by a site-directed method utilizing a “traceless” coupling technology (Philochem). In some instances, the “traceless” coupling technology utilizes an N-terminal 1,2-aminothiol group on the binding moiety which is then conjugate with a polynucleic acid molecule containing an aldehyde group. (see Casi et al., “Site-specific traceless coupling of potent cytotoxic drugs to recombinant antibodies for pharmacodelivery,” JACS 134(13): 5887-5892 (2012))

[0328] In some instances, the polynucleic acid molecule is conjugated to the binding moiety by a site-directed method utilizing an unnatural amino acid incorporated into the binding moiety. In some instances, the unnatural amino acid comprises p-acetylphenylalanine (pAcPhe). In some instances, the keto group of pAcPhe is selectively coupled to an alkoxy-amine derivatived conjugating moiety to form an oxime bond. (see Axup et al., “Synthesis of site-specific antibody-drug conjugates using unnatural amino acids,” PNAS 109(40): 16101-16106 (2012)).

[0329] In some instances, the polynucleic acid molecule is conjugated to the binding moiety by a site-directed method utilizing an enzyme-catalyzed process. In some instances, the site-directed method utilizes SMARTag™ technology (Redwood). In some instances, the SMARTag™ technology comprises generation of a formylglycine (FGly) residue from cysteine by formylglycine-generating enzyme (FGE) through an oxidation process under the presence of an aldehyde tag and the subsequent conjugation of FGly to an alkylhydraine-functionalized polynucleic acid molecule via hydrazino-Pictet-Spengler (HIPS) ligation. (see Wu et al., “Site-specific chemical modification of recombinant proteins produced in mammalian cells by using the genetically encoded aldehyde tag,” PNAS 106(9): 3000-3005 (2009); Agarwal, et al., “A Pictet-Spengler ligation for protein chemical modification,” PNAS 110(1): 46-51 (2013))

[0330] In some instances, the enzyme-catalyzed process comprises microbial transglutaminase (mTG). In some cases, the polynucleic acid molecule is conjugated to the binding moiety utilizing a microbial transglutaminze catalyzed process. In some instances, mTG catalyzes the formation of a covalent bond between the amide side chain of a glutamine within the recognition sequence and a primary amine of a functionalized polynucleic acid molecule. In some instances, mTG is produced from Streptomyces mobarensis. (see Strop et al., “Location matters: site of conjugation modulates stability and pharmacokinetics of antibody drug conjugates,” Chemistry and Biology 20(2) 161-167 (2013))

[0331] In some instances, the polynucleic acid molecule is conjugated to the binding moiety by a method as described in PCT Publication No. WO2014/140317, which utilizes a sequence-specific transpeptidase.

[0332] In some instances, the polynucleic acid molecule is conjugated to the binding moiety by a method as described in U.S. Patent Publication Nos. 2015/0105539 and 2015/0105540.

### Binding Moiety

[0333] In some embodiments, the binding moiety A is a polypeptide. In some instances, the polypeptide is an antibody or its fragment thereof. In some cases, the fragment is a binding fragment. In some instances, the antibody or binding fragment thereof comprises a humanized antibody or binding fragment thereof, murine antibody or binding fragment thereof, chimeric antibody or binding fragment thereof, monoclonal antibody or binding fragment thereof, monovalent Fab′, divalent Fab₂, F(ab)′₃ fragments, single-chain variable fragment (scFv), bis-scFv, (scFv)₂, diabody, minibody, nanobody, triabody, tetrabody, disulfide stabilized Fv protein (dsFv), single-domain antibody (sdAb), Ig NAR, camelid antibody or binding fragment thereof, bispecific antibody or biding fragment thereof, or a chemically modified derivative thereof.

[0334] In some instances, A is an antibody or binding fragment thereof. In some instances, A is a humanized antibody or binding fragment thereof, murine antibody or binding fragment thereof, chimeric antibody or binding fragment thereof, monoclonal antibody or binding fragment thereof, monovalent Fab′, divalent Fab₂, F(ab)′₃ fragments, single-chain variable fragment (scFv), bis-scFv, (scFv)₂, diabody, minibody, nanobody, triabody, tetrabody, disulfide stabilized Fv protein (“dsFv”), single-domain antibody (sdAb), Ig NAR, camelid antibody or binding fragment thereof, bispecific antibody or biding fragment thereof, or a chemically modified derivative thereof. In some instances, A is a humanized antibody or binding fragment thereof. In some instances, A is a murine antibody or binding fragment thereof. In some instances, A is a chimeric antibody or binding fragment thereof. In some instances, A is a monoclonal antibody or binding fragment thereof. In some instances, A is a monovalent Fab′. In some instances, A is a diavalent Fab₂. In some instances, A is a single-chain variable fragment (scFv).

[0335] In some embodiments, the binding moiety A is a bispecific antibody or binding fragment thereof. In some instances, the bispecific antibody is a trifunctional antibody or a bispecific mini-antibody. In some cases, the bispecific antibody is a trifunctional antibody. In some instances, the trifunctional antibody is a full length monoclonal antibody comprising binding sites for two different antigens. Exemplary trifunctional antibodies include catumaxomab (which targets EpCAM and CD3; Fresenius Biotech/Trion Pharma), ertumaxomab (targets HER2/neu/CD3; Fresenius Biotech/Trion Pharma), lymphomun FBTA05 (targets CD20/CD3; Fresenius Biotech/Trion Pharma), RG7221 (R05520985; targets Angiopoietin 2/VEGF; Roche), RG7597 (targets Her1/Her3; Genentech/Roche), MM141 (targets IGF1R/Her3; Merrimack), ABT122 (targets TNFα/IL17; Abbvie), ABT981 (targets IL1α/IL1β; Abbott), LY3164530 (targets Her1/cMET; Eli Lilly), and TRBS07 (Ektomab; targets GD2/CD3; Trion Research Gmbh). Additional exemplary trifunctional antibodies include mAb² from F-star Biotechnology Ltd. In some instances, A is a bispecific trifunctional antibody. In some embodiments, A is a bispecific trifunctional antibody selected from: catumaxomab (which targets EpCAM and CD3; Fresenius Biotech/Trion Pharma), ertumaxomab (targets HER2/neu/CD3; Fresenius Biotech/Trion Pharma), lymphomun FBTA05 (targets CD20/CD3; Fresenius Biotech/Trion Pharma), RG7221 (R05520985; targets Angiopoietin 2/VEGF; Roche), RG7597 (targets Her1/Her3; Genentech/Roche), MM141 (targets IGF1R/Her3; Merrimack), ABT122 (targets TNFα/IL17; Abbvie), ABT981 (targets IL1α/IL1P; Abbott), LY3164530 (targets Her1/cMET; Eli Lilly), TRBS07 (Ektomab; targets GD2/CD3; Trion Research Gmbh), and a mAb² from F-star Biotechnology Ltd.

[0336] In some cases, the bispecific antibody is a bispecific mini-antibody. In some instances, the bispecific mini-antibody comprises divalent Fab₂, F(ab)′₃ fragments, bis-scFv, (scFv)₂, diabody, minibody, triabody, tetrabody or a bi-specific T-cell engager (BiTE). In some embodiments, the bi-specific T-cell engager is a fusion protein that contains two single-chain variable fragments (scFvs) in which the two scFvs target epitopes of two different antigens. Exemplary bispecific mini-antibodies include, but are not limited to, DART (dual-affinity re-targeting platform; MacroGenics), blinatumomab (MT103 or AMG103; which targets CD19/CD3; Micromet), MT111 (targets CEA/CD3; Micromet/Amegen), MT112 (BAY2010112; targets PSMA/CD3; Micromet/Bayer), MT110 (AMG 110; targets EPCAM/CD3; Amgen/Micromet), MGD006 (targets CD123/CD3; MacroGenics), MGD007 (targets GPA33/CD3; MacroGenics), BI1034020 (targets two different epitopes on P-amyloid; Ablynx), ALX0761 (targets IL17A/IL17F; Ablynx), TF2 (targets CEA/hepten; Immunomedics), IL-17/IL-34 biAb (BMS), AFM13 (targets CD30/CD16; Affimed), AFM11 (targets CD19/CD3; Affimed), and domain antibodies (dAbs from Domantis/GSK).

[0337] In some embodiments, the binding moiety A is a bispecific mini-antibody. In some instances, A is a bispecific Fab₂. In some instances, A is a bispecific F(ab)′₃ fragment. In some cases, A is a bispecific bis-scFv. In some cases, A is a bispecific (scFv)₂. In some embodiments, A is a bispecific diabody. In some embodiments, A is a bispecific minibody. In some embodiments, A is a bispecific triabody. In other embodiments, A is a bispecific tetrabody. In other embodiments, A is a bi-specific T-cell engager (BiTE). In additional embodiments, A is a bispecific mini-antibody selected from: DART (dual-affinity re-targeting platform; MacroGenics), blinatumomab (MT103 or AMG103; which targets CD19/CD3; Micromet), MT111 (targets CEA/CD3; Micromet/Amegen), MT112 (BAY2010112; targets PSMA/CD3; Micromet/Bayer), MT110 (AMG 110; targets EPCAM/CD3; Amgen/Micromet), MGD006 (targets CD123/CD3; MacroGenics), MGD007 (targets GPA33/CD3; MacroGenics), BI1034020 (targets two different epitopes on P-amyloid; Ablynx), ALX0761 (targets IL17A/IL17F; Ablynx), TF2 (targets CEA/hepten; Immunomedics), IL-17/IL-34 biAb (BMS), AFM13 (targets CD30/CD16; Affimed), AFM11 (targets CD19/CD3; Affimed), and domain antibodies (dAbs from Domantis/GSK).

[0338] In some embodiments, the binding moiety A is a trispecific antibody. In some instances, the trispecific antibody comprises F(ab)′₃ fragments or a triabody. In some instances, A is a trispecific F(ab)′₃ fragment. In some cases, A is a triabody. In some embodiments, A is a trispecific antibody as described in Dimas, et al., “Development of a trispecific antibody designed to simultaneously and efficiently target three different antigens on tumor cells,” Mol. Pharmaceutics, 12(9): 3490-3501 (2015).

[0339] In some embodiments, the binding moiety A is an antibody or binding fragment thereof that recognizes a cell surface protein. In some instances, the cell surface protein is an antigen expressed by a cancerous cell. Exemplary cancer antigens include, but are not limited to, alpha fetoprotein, ASLG659, B7-H3, BAFF-R, Brevican, CA125 (MUC16), CA15-3, CA19-9, carcinoembryonic antigen (CEA), CA242, CRIPTO (CR, CR1, CRGF, CRIPTO, TDGF1, teratocarcinoma-derived growth factor), CTLA-4, CXCR5, E16 (LAT1, SLC7A5), FcRH2 (IFGP4, IRTA4, SPAP1A (SH2 domain containing phosphatase anchor protein 1a), SPAP1B, SPAP1C), epidermal growth factor, ETBR, Fc receptor-like protein 1 (FCRH1), GEDA, HLA-DOB (Beta subunit of MHC class II molecule (Ia antigen), human chorionic gonadotropin, ICOS, IL-2 receptor, IL20Rα, Immunoglobulin superfamily receptor translocation associated 2 (IRTA2), L6, Lewis Y, Lewis X, MAGE-1, MAGE-2, MAGE-3, MAGE 4, MART1, mesothelin, MDP, MPF (SMR, MSLN), MCP1 (CCL2), macrophage inhibitory factor (MIF), MPG, MSG783, mucin, MUC1-KLH, Napi3b (SLC34A2), nectin-4, Neu oncogene product, NCA, placental alkaline phosphatase, prostate specific membrane antigen (PMSA), prostatic acid phosphatase, PSCA hlg, p97, Purinergic receptor P2X ligand-gated ion channel 5 (P2X5), LY64 (Lymphocyte antigen 64 (RP105), gp100, P21, six transmembrane epithelial antigen of prostate (STEAP1), STEAP2, Sema 5b, tumor-associated glycoprotein 72 (TAG-72), TrpM4 (BR22450, FLJ20041, TRPM4, TRPM4B, transient receptor potential cation channel, subfamily M, member 4) and the like.

[0340] In some instances, the cell surface protein comprises clusters of differentiation (CD) cell surface markers. Exemplary CD cell surface markers include, but are not limited to, CD1, CD2, CD3, CD4, CD5, CD6, CD7, CD8, CD9, CD10, CD11a, CD11b, CD11c, CD11d, CDw12, CD13, CD14, CD15, CD15s, CD16, CDw17, CD18, CD19, CD20, CD21, CD22, CD23, CD24, CD25, CD26, CD27, CD28, CD29, CD30, CD31, CD32, CD33, CD34, CD35, CD36, CD37, CD38, CD39, CD40, CD41, CD42, CD43, CD44, CD45, CD45RO, CD45RA, CD45RB, CD46, CD47, CD48, CD49a, CD49b, CD49c, CD49d, CD49e, CD49f, CD50, CD51, CD52, CD53, CD54, CD55, CD56, CD57, CD58, CD59, CDw60, CD61, CD62E, CD62L (L-selectin), CD62P, CD63, CD64, CD65, CD66a, CD66b, CD66c, CD66d, CD66e, CD79 (e.g., CD79a, CD79b), CD90, CD95 (Fas), CD103, CD104, CD125 (IL5RA), CD134 (OX40), CD137 (4-1BB), CD152 (CTLA-4), CD221, CD274, CD279 (PD-1), CD319 (SLAMF7), CD326 (EpCAM), and the like.

[0341] In some instances, the binding moiety A is an antibody or binding fragment thereof that recognizes a cancer antigen. In some instances, the binding moiety A is an antibody or binding fragment thereof that recognizes alpha fetoprotein, ASLG659, B7-H3, BAFF-R, Brevican, CA125 (MUC16), CA15-3, CA19-9, carcinoembryonic antigen (CEA), CA242, CRIPTO (CR, CR1, CRGF, CRIPTO, TDGF1, teratocarcinoma-derived growth factor), CTLA-4, CXCR5, E16 (LAT1, SLC7A5), FcRH2 (IFGP4, IRTA4, SPAP1A (SH2 domain containing phosphatase anchor protein 1a), SPAP1B, SPAP1C), epidermal growth factor, ETBR, Fc receptor-like protein 1 (FCRH1), GEDA, HLA-DOB (Beta subunit of MHC class II molecule (Ia antigen), human chorionic gonadotropin, ICOS, IL-2 receptor, IL20Rα, Immunoglobulin superfamily receptor translocation associated 2 (IRTA2), L6, Lewis Y, Lewis X, MAGE-1, MAGE-2, MAGE-3, MAGE 4, MART1, mesothelin, MCP1 (CCL2), MDP, macrophage inhibitory factor (MIF), MPF (SMR, MSLN), MPG, MSG783, mucin, MUC1-KLH, Napi3b (SLC34A2), nectin-4, Neu oncogene product, NCA, placental alkaline phosphatase, prostate specific membrane antigen (PMSA), prostatic acid phosphatase, PSCA hlg, p97, Purinergic receptor P2X ligand-gated ion channel 5 (P2X5), LY64 (Lymphocyte antigen 64 (RP105), gp100, P21, six transmembrane epithelial antigen of prostate (STEAP1), STEAP2, Sema 5b, tumor-associated glycoprotein 72 (TAG-72), TrpM4 (BR22450, FLJ20041, TRPM4, TRPM4B, transient receptor potential cation channel, subfamily M, member 4) or a combination thereof.

[0342] In some instances, the binding moiety A is an antibody or binding fragment thereof that recognizes a CD cell surface marker. In some instances, the binding moiety A is an antibody or binding fragment thereof that recognizes CD1, CD2, CD3, CD4, CD5, CD6, CD7, CD8, CD9, CD10, CD11a, CD11b, CD11c, CD11d, CDw12, CD13, CD14, CD15, CD15s, CD16, CDw17, CD18, CD19, CD20, CD21, CD22, CD23, CD24, CD25, CD26, CD27, CD28, CD29, CD30, CD31, CD32, CD33, CD34, CD35, CD36, CD37, CD38, CD39, CD40, CD41, CD42, CD43, CD44, CD45, CD45RO, CD45RA, CD45RB, CD46, CD47, CD48, CD49a, CD49b, CD49c, CD49d, CD49e, CD49f, CD50, CD51, CD52, CD53, CD54, CD55, CD56, CD57, CD58, CD59, CDw60, CD61, CD62E, CD62L (L-selectin), CD62P, CD63, CD64, CD65, CD66a, CD66b, CD66c, CD66d, CD66e, CD79 (e.g., CD79a, CD79b), CD90, CD95 (Fas), CD103, CD104, CD125 (IL5RA), CD134 (OX40), CD137 (4-1BB), CD152 (CTLA-4), CD221, CD274, CD279 (PD-1), CD319 (SLAMF7), CD326 (EpCAM), or a combination thereof.

[0343] In some embodiments, the antibody or binding fragment thereof comprises zalutumumab (HuMax-EFGr, Genmab), abagovomab (Menarini), abituzumab (Merck), adecatumumab (MT201), alacizumab pegol, alemtuzumab (Campath®, MabCampath, or Campath-1H; Leukosite), AlloMune (BioTransplant), amatuximab (Morphotek, Inc.), anti-VEGF (Genetech), anatumomab mafenatox, apolizumab (hu1D10), ascrinvacumab (Pfizer Inc.), atezolizumab (MPDL3280A; Genentech/Roche), B43.13 (OvaRex, AltaRex Corporation), basiliximab (Simulect®, Novartis), belimumab (Benlysta®, GlaxoSmithKline), bevacizumab (Avastin®, Genentech), blinatumomab (Blincyto, AMG103; Amgen), BEC2 (ImGlone Systems Inc.), carlumab (Janssen Biotech), catumaxomab (Removab, Trion Pharma), CEAcide (Immunomedics), Cetuximab (Erbitux®, ImClone), citatuzumab bogatox (VB6-845), cixutumumab (IMC-A12, ImClone Systems Inc.), conatumumab (AMG 655, Amgen), dacetuzumab (SGN-40, huS2C6; Seattle Genetics, Inc.), daratumumab (Darzalex®, Janssen Biotech), detumomab, drozitumab (Genentech), durvalumab (MedImmune), dusigitumab (MedImmune), edrecolomab (MAb17-1A, Panorex, Glaxo Wellcome), elotuzumab (Empliciti™, Bristol-Myers Squibb), emibetuzumab (Eli Lilly), enavatuzumab (Facet Biotech Corp.), enfortumab vedotin (Seattle Genetics, Inc.), enoblituzumab (MGA271, MacroGenics, Inc.), ensituxumab (Neogenix Oncology, Inc.), epratuzumab (LymphoCide, Immunomedics, Inc.), ertumaxomab (Rexomun®, Trion Pharma), etaracizumab (Abegrin, MedImmune), farletuzumab (MORAb-003, Morphotek, Inc), FBTA05 (Lymphomun, Trion Pharma), ficlatuzumab (AVEO Pharmaceuticals), figitumumab (CP-751871, Pfizer), flanvotumab (ImClone Systems), fresolimumab (GC1008, Aanofi-Aventis), futuximab, glaximab, ganitumab (Amgen), girentuximab (Rencarex®, Wilex AG), IMAB362 (Claudiximab, Ganymed Pharmaceuticals AG), imalumab (Baxalta), IMC-1C11 (ImClone Systems), IMC-C225 (Imclone Systems Inc.), imgatuzumab (Genentech/Roche), intetumumab (Centocor, Inc.), ipilimumab (Yervoy®, Bristol-Myers Squibb), iratumumab (Medarex, Inc.), isatuximab (SAR650984, Sanofi-Aventis), labetuzumab (CEA-CIDE, Immunomedics), lexatumumab (ETR2-ST01, Cambridge Antibody Technology), lintuzumab (SGN-33, Seattle Genetics), lucatumumab (Novartis), lumiliximab, mapatumumab (HGS-ETR1, Human Genome Sciences), matuzumab (EMD 72000, Merck), milatuzumab (hLL1, Immunomedics, Inc.), mitumomab (BEC-2, ImClone Systems), narnatumab (ImClone Systems), necitumumab (Portrazza™, Eli Lilly), nesvacumab (Regeneron Pharmaceuticals), nimotuzumab (h-R3, BIOMAb EGFR, TheraCIM, Theraloc, or CIMAher; Biotech Pharmaceutical Co.), nivolumab (Opdivo®, Bristol-Myers Squibb), obinutuzumab (Gazyva or Gazyvaro; Hoffmann-La Roche), ocaratuzumab (AME-133v, LY2469298; Mentrik Biotech, LLC), ofatumumab (Arzerra®, Genmab), onartuzumab (Genentech), Ontuxizumab (Morphotek, Inc.), oregovomab (OvaRex®, AltaRex Corp.), otlertuzumab (Emergent BioSolutions), panitumumab (ABX-EGF, Amgen), pankomab (Glycotope GMBH), parsatuzumab (Genentech), patritumab, pembrolizumab (Keytruda®, Merck), pemtumomab (Theragyn, Antisoma), pertuzumab (Perjeta, Genentech), pidilizumab (CT-011, Medivation), polatuzumab vedotin (Genentech/Roche), pritumumab, racotumomab (Vaxira®, Recombio), ramucirumab (Cyramza®, ImClone Systems Inc.), rituximab (Rituxan®, Genentech), robatumumab (Schering-Plough), Seribantumab (Sanofi/Merrimack Pharmaceuticals, Inc.), sibrotuzumab, siltuximab (Sylvant™, Janssen Biotech), Smart M195 (Protein Design Labs, Inc.), Smart ID10 (Protein Design Labs, Inc.), tabalumab (LY2127399, Eli Lilly), taplitumomab paptox, tenatumomab, teprotumumab (Roche), tetulomab, TGN1412 (CD28-SuperMAB or TAB08), tigatuzumab (CD-1008, Daiichi Sankyo), tositumomab, trastuzumab (Herceptin®), tremelimumab (CP-672,206; Pfizer), tucotuzumab celmoleukin (EMD Pharmaceuticals), ublituximab, urelumab (BMS-663513, Bristol-Myers Squibb), volociximab (M200, Biogen Idec), zatuximab, and the like.

[0344] In some embodiments, the binding moiety A comprises zalutumumab (HuMax-EFGr, Genmab), abagovomab (Menarini), abituzumab (Merck), adecatumumab (MT201), alacizumab pegol, alemtuzumab (Campath®, MabCampath, or Campath-1H; Leukosite), AlloMune (BioTransplant), amatuximab (Morphotek, Inc.), anti-VEGF (Genetech), anatumomab mafenatox, apolizumab (hulD10), ascrinvacumab (Pfizer Inc.), atezolizumab (MPDL3280A; Genentech/Roche), B43.13 (OvaRex, AltaRex Corporation), basiliximab (Simulect®, Novartis), belimumab (Benlysta®, GlaxoSmithKline), bevacizumab (Avastin®, Genentech), blinatumomab (Blincyto, AMG103; Amgen), BEC2 (ImGlone Systems Inc.), carlumab (Janssen Biotech), catumaxomab (Removab, Trion Pharma), CEAcide (Immunomedics), Cetuximab (Erbitux®, ImClone), citatuzumab bogatox (VB6-845), cixutumumab (IMC-A12, ImClone Systems Inc.), conatumumab (AMG 655, Amgen), dacetuzumab (SGN-40, huS2C6; Seattle Genetics, Inc.), daratumumab (Darzalex®, Janssen Biotech), detumomab, drozitumab (Genentech), durvalumab (MedImmune), dusigitumab (MedImmune), edrecolomab (MAb17-1A, Panorex, Glaxo Wellcome), elotuzumab (Empliciti™, Bristol-Myers Squibb), emibetuzumab (Eli Lilly), enavatuzumab (Facet Biotech Corp.), enfortumab vedotin (Seattle Genetics, Inc.), enoblituzumab (MGA271, MacroGenics, Inc.), ensituxumab (Neogenix Oncology, Inc.), epratuzumab (LymphoCide, Immunomedics, Inc.), ertumaxomab (Rexomun®, Trion Pharma), etaracizumab (Abegrin, MedImmune), farletuzumab (MORAb-003, Morphotek, Inc), FBTA05 (Lymphomun, Trion Pharma), ficlatuzumab (AVEO Pharmaceuticals), figitumumab (CP-751871, Pfizer), flanvotumab (ImClone Systems), fresolimumab (GC1008, Aanofi-Aventis), futuximab, glaximab, ganitumab (Amgen), girentuximab (Rencarex®, Wilex AG), IMAB362 (Claudiximab, Ganymed Pharmaceuticals AG), imalumab (Baxalta), IMC-1C11 (ImClone Systems), IMC-C225 (Imclone Systems Inc.), imgatuzumab (Genentech/Roche), intetumumab (Centocor, Inc.), ipilimumab (Yervoy®, Bristol-Myers Squibb), iratumumab (Medarex, Inc.), isatuximab (SAR650984, Sanofi-Aventis), labetuzumab (CEA-CIDE, Immunomedics), lexatumumab (ETR2-ST01, Cambridge Antibody Technology), lintuzumab (SGN-33, Seattle Genetics), lucatumumab (Novartis), lumiliximab, mapatumumab (HGS-ETR1, Human Genome Sciences), matuzumab (EMD 72000, Merck), milatuzumab (hLL1, Immunomedics, Inc.), mitumomab (BEC-2, ImClone Systems), narnatumab (ImClone Systems), necitumumab (Portrazza™, Eli Lilly), nesvacumab (Regeneron Pharmaceuticals), nimotuzumab (h-R3, BIOMAb EGFR, TheraCIM, Theraloc, or CIMAher; Biotech Pharmaceutical Co.), nivolumab (Opdivo®, Bristol-Myers Squibb), obinutuzumab (Gazyva or Gazyvaro; Hoffmann-La Roche), ocaratuzumab (AME-133v, LY2469298; Mentrik Biotech, LLC), ofatumumab (Arzerra®, Genmab), onartuzumab (Genentech), Ontuxizumab (Morphotek, Inc.), oregovomab (OvaRex®, AltaRex Corp.), otlertuzumab (Emergent BioSolutions), panitumumab (ABX-EGF, Amgen), pankomab (Glycotope GMBH), parsatuzumab (Genentech), patritumab, pembrolizumab (Keytruda®, Merck), pemtumomab (Theragyn, Antisoma), pertuzumab (Perjeta, Genentech), pidilizumab (CT-011, Medivation), polatuzumab vedotin (Genentech/Roche), pritumumab, racotumomab (Vaxira®, Recombio), ramucirumab (Cyramza®, ImClone Systems Inc.), rituximab (Rituxan®, Genentech), robatumumab (Schering-Plough), Seribantumab (Sanofi/Merrimack Pharmaceuticals, Inc.), sibrotuzumab, siltuximab (Sylvant™, Janssen Biotech), Smart MI95 (Protein Design Labs, Inc.), Smart ID10 (Protein Design Labs, Inc.), tabalumab (LY2127399, Eli Lilly), taplitumomab paptox, tenatumomab, teprotumumab (Roche), tetulomab, TGN1412 (CD28-SuperMAB or TAB08), tigatuzumab (CD-1008, Daiichi Sankyo), tositumomab, trastuzumab (Herceptin®), tremelimumab (CP-672,206; Pfizer), tucotuzumab celmoleukin (EMD Pharmaceuticals), ublituximab, urelumab (BMS-663513, Bristol-Myers Squibb), volociximab (M200, Biogen Idec), or zatuximab. In some embodiments, the binding moiety A is zalutumumab (HuMax-EFGr, by Genmab).

[0345] In some embodiments, the binding moiety A is conjugated according to Formula (I) to a polynucleic acid molecule (B), and a polymer (C), and optionally an endosomolytic moiety (D) according to Formula (II) described herein. In some instances, the polynucleic acid molecule comprises a sequence having at least 50%, 55%, 60%, 65%, 70%, 75%, 80%, 85%, 90%, 95%, 96%, 97%, 98%, 99%, or 100% sequence identity to a sequence listed in Tables 2, 3, 5, 6, 7, 9, or 11. In some embodiments, the polynucleic acid molecule comprises a sequence having at least 50%, 55%, 60%, 65%, 70%, 75%, 80%, 85%, 90%, 95%, 96%, 97%, 98%, 99%, or 100% sequence identity to SEQ ID NOs: 16-75, 452-1955, 1956-1962, 1967-2002, 2013-2032, 2082-2109, or 2117. In some instances, the polynucleic acid molecule comprises a sequence selected from SEQ ID NOs: 16-75, 452-1955, 1956-1962, 1967-2002, 2013-2032, 2082-2109, or 2117. In some instances, the polymer C comprises polyalkylen oxide (e.g., polyethylene glycol). In some embodiments, the endosomolytic moiety D comprises INF7 or melittin, or their respective derivatives.

[0346] In some embodiments, the binding moiety A is conjugated to a polynucleic acid molecule (B), and a polymer (C), and optionally an endosomolytic moiety (D) as illustrated in FIG. 1. In some instances, the binding moiety A is an antibody or binding fragment thereof.

[0347] In some embodiments, the binding moiety A is conjugated to a polynucleic acid molecule (B) non-specifically. In some instances, the binding moiety A is conjugated to a polynucleic acid molecule (B) via a lysine residue or a cysteine residue, in a non-site specific manner. In some instances, the binding moiety A is conjugated to a polynucleic acid molecule (B) via a lysine residue in a non-site specific manner. In some cases, the binding moiety A is conjugated to a polynucleic acid molecule (B) via a cysteine residue in a non-site specific manner. In some instances, the binding moiety A is an antibody or binding fragment thereof.

[0348] In some embodiments, the binding moiety A is conjugated to a polynucleic acid molecule (B) in a site-specific manner. In some instances, the binding moiety A is conjugated to a polynucleic acid molecule (B) through a lysine residue, a cysteine residue, at the 5′-terminus, at the 3′-terminus, an unnatural amino acid, or an enzyme-modified or enzyme-catalyzed residue, via a site-specific manner. In some instances, the binding moiety A is conjugated to a polynucleic acid molecule (B) through a lysine residue via a site-specific manner. In some instances, the binding moiety A is conjugated to a polynucleic acid molecule (B) through a cysteine residue via a site-specific manner. In some instances, the binding moiety A is conjugated to a polynucleic acid molecule (B) at the 5′-terminus via a site-specific manner. In some instances, the binding moiety A is conjugated to a polynucleic acid molecule (B) at the 3′-terminus via a site-specific manner. In some instances, the binding moiety A is conjugated to a polynucleic acid molecule (B) through an unnatural amino acid via a site-specific manner. In some instances, the binding moiety A is conjugated to a polynucleic acid molecule (B) through an enzyme-modified or enzyme-catalyzed residue via a site-specific manner. In some instances, the binding moiety A is an antibody or binding fragment thereof.

[0349] In some embodiments, one or more regions of a binding moiety A (e.g., an antibody or binding fragment thereof) is conjugated to a polynucleic acid molecule (B). In some instances, the one or more regions of a binding moiety A comprise the N-terminus, the C-terminus, in the constant region, at the hinge region, or the Fc region of the binding moiety A. In some instances, the polynucleic acid molecule (B) is conjugated to the N-terminus of the binding moiety A (e.g., the N-terminus of an antibody or binding fragment thereof). In some instances, the polynucleic acid molecule (B) is conjugated to the C-terminus of the binding moiety A (e.g., the N-terminus of an antibody or binding fragment thereof). In some instances, the polynucleic acid molecule (B) is conjugated to the constant region of the binding moiety A (e.g., the constant region of an antibody or binding fragment thereof). In some instances, the polynucleic acid molecule (B) is conjugated to the hinge region of the binding moiety A (e.g., the constant region of an antibody or binding fragment thereof). In some instances, the polynucleic acid molecule (B) is conjugated to the Fc region of the binding moiety A (e.g., the constant region of an antibody or binding fragment thereof).

[0350] In some embodiments, one or more polynucleic acid molecule (B) is conjugated to a binding moiety A. In some instances, about 1, 2, 3, 4, 5, 6, 7, 8, 9, 10, 11, 12, 13, 14, 15, 16, or more polynucleic acid molecules are conjugated to one binding moiety A. In some instances, about 1 polynucleic acid molecule is conjugated to one binding moiety A. In some instances, about 2 polynucleic acid molecules are conjugated to one binding moiety A. In some instances, about 3 polynucleic acid molecules are conjugated to one binding moiety A. In some instances, about 4 polynucleic acid molecules are conjugated to one binding moiety A. In some instances, about 5 polynucleic acid molecules are conjugated to one binding moiety A. In some instances, about 6 polynucleic acid molecules are conjugated to one binding moiety A. In some instances, about 7 polynucleic acid molecules are conjugated to one binding moiety A. In some instances, about 8 polynucleic acid molecules are conjugated to one binding moiety A. In some instances, about 9 polynucleic acid molecules are conjugated to one binding moiety A. In some instances, about 10 polynucleic acid molecules are conjugated to one binding moiety A. In some instances, about 11 polynucleic acid molecules are conjugated to one binding moiety A. In some instances, about 12 polynucleic acid molecules are conjugated to one binding moiety A. In some instances, about 13 polynucleic acid molecules are conjugated to one binding moiety A. In some instances, about 14 polynucleic acid molecules are conjugated to one binding moiety A. In some instances, about 15 polynucleic acid molecules are conjugated to one binding moiety A. In some instances, about 16 polynucleic acid molecules are conjugated to one binding moiety A. In some cases, the one or more polynucleic acid molecules are the same. In other cases, the one or more polynucleic acid molecules are different. In some instances, the binding moiety A is an antibody or binding fragment thereof.

[0351] In some embodiments, the number of polynucleic acid molecule (B) conjugated to a binding moiety A (e.g., an antibody or binding fragment thereof) forms a ratio. In some instances, the ratio is referred to as a DAR (drug-to-antibody) ratio, in which the drug as referred to herein is the polynucleic acid molecule (B). In some instances, the DAR ratio of the polynucleic acid molecule (B) to binding moiety A is about 1, 2, 3, 4, 5, 6, 7, 8, 9, 10, 11, 12, 13, 14, 15, 16, or greater. In some instances, the DAR ratio of the polynucleic acid molecule (B) to binding moiety A is about 1 or greater. In some instances, the DAR ratio of the polynucleic acid molecule (B) to binding moiety A is about 2 or greater. In some instances, the DAR ratio of the polynucleic acid molecule (B) to binding moiety A is about 3 or greater. In some instances, the DAR ratio of the polynucleic acid molecule (B) to binding moiety A is about 4 or greater. In some instances, the DAR ratio of the polynucleic acid molecule (B) to binding moiety A is about 5 or greater. In some instances, the DAR ratio of the polynucleic acid molecule (B) to binding moiety A is about 6 or greater. In some instances, the DAR ratio of the polynucleic acid molecule (B) to binding moiety A is about 7 or greater. In some instances, the DAR ratio of the polynucleic acid molecule (B) to binding moiety A is about 8 or greater. In some instances, the DAR ratio of the polynucleic acid molecule (B) to binding moiety A is about 9 or greater. In some instances, the DAR ratio of the polynucleic acid molecule (B) to binding moiety A is about 10 or greater. In some instances, the DAR ratio of the polynucleic acid molecule (B) to binding moiety A is about 11 or greater. In some instances, the DAR ratio of the polynucleic acid molecule (B) to binding moiety A is about 12 or greater.

[0352] In some instances, the DAR ratio of the polynucleic acid molecule (B) to binding moiety A (e.g., an antibody or binding fragment thereof) is about 1, 2, 3, 4, 5, 6, 7, 8, 9, 10, 11, 12, 13, 14, 15, or 16. In some instances, the DAR ratio of the polynucleic acid molecule (B) to binding moiety A is about 1. In some instances, the DAR ratio of the polynucleic acid molecule (B) to binding moiety A is about 2. In some instances, the DAR ratio of the polynucleic acid molecule (B) to binding moiety A is about 3. In some instances, the DAR ratio of the polynucleic acid molecule (B) to binding moiety A is about 4. In some instances, the DAR ratio of the polynucleic acid molecule (B) to binding moiety A is about 5. In some instances, the DAR ratio of the polynucleic acid molecule (B) to binding moiety A is about 6. In some instances, the DAR ratio of the polynucleic acid molecule (B) to binding moiety A is about 7. In some instances, the DAR ratio of the polynucleic acid molecule (B) to binding moiety A is about 8. In some instances, the DAR ratio of the polynucleic acid molecule (B) to binding moiety A is about 9. In some instances, the DAR ratio of the polynucleic acid molecule (B) to binding moiety A is about 10. In some instances, the DAR ratio of the polynucleic acid molecule (B) to binding moiety A is about 11. In some instances, the DAR ratio of the polynucleic acid molecule (B) to binding moiety A is about 12. In some instances, the DAR ratio of the polynucleic acid molecule (B) to binding moiety A is about 13. In some instances, the DAR ratio of the polynucleic acid molecule (B) to binding moiety A is about 14. In some instances, the DAR ratio of the polynucleic acid molecule (B) to binding moiety A is about 15. In some instances, the DAR ratio of the polynucleic acid molecule (B) to binding moiety A is about 16.

[0353] In some instances, the DAR ratio of the polynucleic acid molecule (B) to binding moiety A is 1, 2, 3, 4, 5, 6, 7, 8, 9, 10, 11, 12, 13, 14, 15, or 16. In some instances, the DAR ratio of the polynucleic acid molecule (B) to binding moiety A is 1. In some instances, the DAR ratio of the polynucleic acid molecule (B) to binding moiety A is 2. In some instances, the DAR ratio of the polynucleic acid molecule (B) to binding moiety A is 4. In some instances, the DAR ratio of the polynucleic acid molecule (B) to binding moiety A is 6. In some instances, the DAR ratio of the polynucleic acid molecule (B) to binding moiety A is 8. In some instances, the DAR ratio of the polynucleic acid molecule (B) to binding moiety A is 12.

[0354] In some embodiments, an antibody or its binding fragment is further modified using conventional techniques known in the art, for example, by using amino acid deletion, insertion, substitution, addition, and/or by recombination and/or any other modification (e.g. posttranslational and chemical modifications, such as glycosylation and phosphorylation) known in the art either alone or in combination. In some instances, the modification further comprises a modification for modulating interaction with Fc receptors. In some instances, the one or more modifications include those described in, for example, International Publication No. WO97/34631, which discloses amino acid residues involved in the interaction between the Fc domain and the FcRn receptor. Methods for introducing such modifications in the nucleic acid sequence underlying the amino acid sequence of an antibody or its binding fragment is well known to the person skilled in the art.

[0355] In some instances, an antibody binding fragment further encompasses its derivatives and includes polypeptide sequences containing at least one CDR.

[0356] In some instances, the term “single-chain” as used herein means that the first and second domains of a bi-specific single chain construct are covalently linked, preferably in the form of a co-linear amino acid sequence encodable by a single nucleic acid molecule.

[0357] In some instances, a bispecific single chain antibody construct relates to a construct comprising two antibody derived binding domains. In such embodiments, bi-specific single chain antibody construct is tandem bi-scFv or diabody. In some instances, a scFv contains a VH and VL domain connected by a linker peptide. In some instances, linkers are of a length and sequence sufficient to ensure that each of the first and second domains can, independently from one another, retain their differential binding specificities.

[0358] In some embodiments, binding to or interacting with as used herein defines a binding/interaction of at least two antigen-interaction-sites with each other. In some instances, antigen-interaction-site defines a motif of a polypeptide that shows the capacity of specific interaction with a specific antigen or a specific group of antigens. In some cases, the binding/interaction is also understood to define a specific recognition. In such cases, specific recognition refers to that the antibody or its binding fragment is capable of specifically interacting with and/or binding to at least two amino acids of each of a target molecule. For example, specific recognition relates to the specificity of the antibody molecule, or to its ability to discriminate between the specific regions of a target molecule. In additional instances, the specific interaction of the antigen-interaction-site with its specific antigen results in an initiation of a signal, e.g. due to the induction of a change of the conformation of the antigen, an oligomerization of the antigen, etc. In further embodiments, the binding is exemplified by the specificity of a “key-lock-principle”. Thus in some instances, specific motifs in the amino acid sequence of the antigen-interaction-site and the antigen bind to each other as a result of their primary, secondary or tertiary structure as well as the result of secondary modifications of said structure. In such cases, the specific interaction of the antigen-interaction-site with its specific antigen results as well in a simple binding of the site to the antigen.

[0359] In some instances, specific interaction further refers to a reduced cross-reactivity of the antibody or its binding fragment or a reduced off-target effect. For example, the antibody or its binding fragment that bind to the polypeptide/protein of interest but do not or do not essentially bind to any of the other polypeptides are considered as specific for the polypeptide/protein of interest. Examples for the specific interaction of an antigen-interaction-site with a specific antigen comprise the specificity of a ligand for its receptor, for example, the interaction of an antigenic determinant (epitope) with the antigenic binding site of an antibody.

### Additional Binding Moieties

[0360] In some embodiments, the binding moiety is a plasma protein. In some instances, the plasma protein comprises albumin. In some instances, the binding moiety A is albumin. In some instances, albumin is conjugated by one or more of a conjugation chemistry described herein to a polynucleic acid molecule. In some instances, albumin is conjugated by native ligation chemistry to a polynucleic acid molecule. In some instances, albumin is conjugated by lysine conjugation to a polynucleic acid molecule.

[0361] In some instances, the binding moiety is a steroid. Exemplary steroids include cholesterol, phospholipids, di- and triacylglycerols, fatty acids, hydrocarbons that are saturated, unsaturated, comprise substitutions, or combinations thereof. In some instances, the steroid is cholesterol. In some instances, the binding moiety is cholesterol. In some instances, cholesterol is conjugated by one or more of a conjugation chemistry described herein to a polynucleic acid molecule. In some instances, cholesterol is conjugated by native ligation chemistry to a polynucleic acid molecule. In some instances, cholesterol is conjugated by lysine conjugation to a polynucleic acid molecule.

[0362] In some instances, the binding moiety is a polymer, including but not limited to poly nucleic acid molecule aptamers that bind to specific surface markers on cells. In this instance the binding moiety is a polynucleic acid that does not hybridize to a target gene or mRNA, but instead is capable of selectively binding to a cell surface marker similarly to an antibody binding to its specific epitope of a cell surface marker.

[0363] In some cases, the binding moiety is a peptide. In some cases, the peptide comprises between about 1 and about 3 kDa. In some cases, the peptide comprises between about 1.2 and about 2.8 kDa, about 1.5 and about 2.5 kDa, or about 1.5 and about 2 kDa. In some instances, the peptide is a bicyclic peptide. In some cases, the bicyclic peptide is a constrained bicyclic peptide. In some instances, the binding moiety is a bicyclic peptide (e.g., bicycles from Bicycle Therapeutics).

[0364] In additional cases, the binding moiety is a small molecule. In some instances, the small molecule is an antibody-recruiting small molecule. In some cases, the antibody-recruiting small molecule comprises a target-binding terminus and an antibody-binding terminus, in which the target-binding terminus is capable of recognizing and interacting with a cell surface receptor. For example, in some instances, the target-binding terminus comprising a glutamate urea compound enables interaction with PSMA, thereby, enhances an antibody interaction with a cell (e.g., a cancerous cell) that expresses PSMA. In some instances, a binding moiety is a small molecule described in Zhang et al., “A remote arene-binding site on prostate specific membrane antigen revealed by antibody-recruiting small molecules,” J Am Chem Soc. 132(36): 12711-12716 (2010); or McEnaney, et al., “Antibody-recruiting molecules: an emerging paradigm for engaging immune function in treating human disease,” ACS Chem Biol. 7(7): 1139-1151 (2012).

### Production of Antibodies or Binding Fragments Thereof

[0365] In some embodiments, polypeptides described herein (e.g., antibodies and its binding fragments) are produced using any method known in the art to be useful for the synthesis of polypeptides (e.g., antibodies), in particular, by chemical synthesis or by recombinant expression, and are preferably produced by recombinant expression techniques.

[0366] In some instances, an antibody or its binding fragment thereof is expressed recombinantly, and the nucleic acid encoding the antibody or its binding fragment is assembled from chemically synthesized oligonucleotides (e.g., as described in Kutmeier et al., 1994, BioTechniques 17:242), which involves the synthesis of overlapping oligonucleotides containing portions of the sequence encoding the antibody, annealing and ligation of those oligonucleotides, and then amplification of the ligated oligonucleotides by PCR.

[0367] Alternatively, a nucleic acid molecule encoding an antibody is optionally generated from a suitable source (e.g., an antibody cDNA library, or cDNA library generated from any tissue or cells expressing the immunoglobulin) by PCR amplification using synthetic primers hybridizable to the 3′ and 5′ ends of the sequence or by cloning using an oligonucleotide probe specific for the particular gene sequence.

[0368] In some instances, an antibody or its binding is optionally generated by immunizing an animal, such as a rabbit, to generate polyclonal antibodies or, more preferably, by generating monoclonal antibodies, e.g., as described by Kohler and Milstein (1975, Nature 256:495-497) or, as described by Kozbor et al. (1983, Immunology Today 4:72) or Cole et al. (1985 in Monoclonal Antibodies and Cancer Therapy, Alan R. Liss, Inc., pp. 77-96). Alternatively, a clone encoding at least the Fab portion of the antibody is optionally obtained by screening Fab expression libraries (e.g., as described in Huse et al., 1989, Science 246:1275-1281) for clones of Fab fragments that bind the specific antigen or by screening antibody libraries (See, e.g., Clackson et al., 1991, Nature 352:624; Hane et al., 1997 Proc. Natl. Acad. Sci. USA 94:4937).

[0369] In some embodiments, techniques developed for the production of “chimeric antibodies” (Morrison et al., 1984, Proc. Natl. Acad. Sci. 81:851-855; Neuberger et al., 1984, Nature 312:604-608; Takeda et al., 1985, Nature 314:452-454) by splicing genes from a mouse antibody molecule of appropriate antigen specificity together with genes from a human antibody molecule of appropriate biological activity are used. A chimeric antibody is a molecule in which different portions are derived from different animal species, such as those having a variable region derived from a murine monoclonal antibody and a human immunoglobulin constant region, e.g., humanized antibodies.

[0370] In some embodiments, techniques described for the production of single chain antibodies (U.S. Pat. No. 4,694,778; Bird, 1988, Science 242:423-42; Huston et al., 1988, Proc. Natl. Acad. Sci. USA 85:5879-5883; and Ward et al., 1989, Nature 334:544-54) are adapted to produce single chain antibodies. Single chain antibodies are formed by linking the heavy and light chain fragments of the Fv region via an amino acid bridge, resulting in a single chain polypeptide. Techniques for the assembly of functional Fv fragments in E. coli are also optionally used (Skerra et al., 1988, Science 242:1038-1041).

[0371] In some embodiments, an expression vector comprising the nucleotide sequence of an antibody or the nucleotide sequence of an antibody is transferred to a host cell by conventional techniques (e.g., electroporation, liposomal transfection, and calcium phosphate precipitation), and the transfected cells are then cultured by conventional techniques to produce the antibody. In specific embodiments, the expression of the antibody is regulated by a constitutive, an inducible or a tissue, specific promoter.

[0372] In some embodiments, a variety of host-expression vector systems is utilized to express an antibody or its binding fragment described herein. Such host-expression systems represent vehicles by which the coding sequences of the antibody is produced and subsequently purified, but also represent cells that are, when transformed or transfected with the appropriate nucleotide coding sequences, express an antibody or its binding fragment in situ. These include, but are not limited to, microorganisms such as bacteria (e.g., E. coli and B. subtilis) transformed with recombinant bacteriophage DNA, plasmid DNA or cosmid DNA expression vectors containing an antibody or its binding fragment coding sequences; yeast (e.g., Saccharomyces Pichia) transformed with recombinant yeast expression vectors containing an antibody or its binding fragment coding sequences; insect cell systems infected with recombinant virus expression vectors (e.g., baculovirus) containing an antibody or its binding fragment coding sequences; plant cell systems infected with recombinant virus expression vectors (e.g., cauliflower mosaic virus (CaMV) and tobacco mosaic virus (TMV)) or transformed with recombinant plasmid expression vectors (e.g., Ti plasmid) containing an antibody or its binding fragment coding sequences; or mammalian cell systems (e.g., COS, CHO, BH, 293, 293T, 3T3 cells) harboring recombinant expression constructs containing promoters derived from the genome of mammalian cells (e.g., metallothionein promoter) or from mammalian viruses (e.g. the adenovirus late promoter; the vaccinia virus 7.5K promoter).

[0373] For long-term, high-yield production of recombinant proteins, stable expression is preferred. In some instances, cell lines that stably express an antibody are optionally engineered. Rather than using expression vectors that contain viral origins of replication, host cells are transformed with DNA controlled by appropriate expression control elements (e.g., promoter, enhancer, sequences, transcription terminators, polyadenylation sites, etc.), and a selectable marker. Following the introduction of the foreign DNA, engineered cells are then allowed to grow for 1-2 days in an enriched media, and then are switched to a selective media. The selectable marker in the recombinant plasmid confers resistance to the selection and allows cells to stably integrate the plasmid into their chromosomes and grow to form foci that in turn are cloned and expanded into cell lines. This method can advantageously be used to engineer cell lines which express the antibody or its binding fragments.

[0374] In some instances, a number of selection systems are used, including but not limited to the herpes simplex virus thymidine kinase (Wigler et al., 1977, Cell 11:223), hypoxanthine-guanine phosphoribosyltransferase (Szybalska & Szybalski, 192, Proc. Natl. Acad. Sci. USA 48:202), and adenine phosphoribosyltransferase (Lowy et al., 1980, Cell 22:817) genes are employed in tk-, hgprt- or aprt-cells, respectively. Also, antimetabolite resistance are used as the basis of selection for the following genes: dhfr, which confers resistance to methotrexate (Wigler et al., 1980, Proc. Natl. Acad. Sci. USA 77:357; O'Hare et al., 1981, Proc. Natl. Acad. Sci. USA 78:1527); gpt, which confers resistance to mycophenolic acid (Mulligan & Berg, 1981, Proc. Natl. Acad. Sci. USA 78:2072); neo, which confers resistance to the aminoglycoside G-418 (Clinical Pharmacy 12:488-505; Wu and Wu, 1991, Biotherapy 3:87-95; Tolstoshev, 1993, Ann. Rev. Pharmacol. Toxicol. 32:573-596; Mulligan, 1993, Science 260:926-932; and Morgan and Anderson, 1993, Ann. Rev. Biochem. 62:191-217; May, 1993, TIB TECH 11(5):155-215) and hygro, which confers resistance to hygromycin (Santerre et al., 1984, Gene 30:147). Methods commonly known in the art of recombinant DNA technology which can be used are described in Ausubel et al. (eds., 1993, Current Protocols in Molecular Biology, John Wiley & Sons, NY; Kriegler, 1990, Gene Transfer and Expression, A Laboratory Manual, Stockton Press, NY; and in Chapters 12 and 13, Dracopoli et al. (eds), 1994, Current Protocols in Human Genetics, John Wiley & Sons, NY.; Colberre-Garapin et al., 1981, J. Mol. Biol. 150:1).

[0375] In some instances, the expression levels of an antibody are increased by vector amplification (for a review, see Bebbington and Hentschel, The use of vectors based on gene amplification for the expression of cloned genes in mammalian cells in DNA cloning, Vol. 3. (Academic Press, New York, 1987)). When a marker in the vector system expressing an antibody is amplifiable, an increase in the level of inhibitor present in culture of host cell will increase the number of copies of the marker gene. Since the amplified region is associated with the nucleotide sequence of the antibody, production of the antibody will also increase (Crouse et al., 1983, Mol. Cell Biol. 3:257).

[0376] In some instances, any method known in the art for purification of an antibody is used, for example, by chromatography (e.g., ion exchange, affinity, particularly by affinity for the specific antigen after Protein A, and sizing column chromatography), centrifugation, differential solubility, or by any other standard technique for the purification of proteins.

### Polymer Conjugating Moiety

[0377] In some embodiments, a polymer moiety C is further conjugated to a polynucleic acid molecule described herein, a binding moiety described herein, or in combinations thereof. In some instances, a polymer moiety C is conjugated a polynucleic acid molecule. In some cases, a polymer moiety C is conjugated to a binding moiety. In other cases, a polymer moiety C is conjugated to a polynucleic acid molecule-binding moiety molecule. In additional cases, a polymer moiety C is conjugated, as illustrated in FIG. 1, and as discussed under the Therapeutic Molecule Platform section.

[0378] In some instances, the polymer moiety C is a natural or synthetic polymer, consisting of long chains of branched or unbranched monomers, and/or cross-linked network of monomers in two or three dimensions. In some instances, the polymer moiety C includes a polysaccharide, lignin, rubber, or polyalkylen oxide (e.g., polyethylene glycol). In some instances, the at least one polymer moiety C includes, but is not limited to, alpha-, omega-dihydroxylpolyethyleneglycol, biodegradable lactone-based polymer, e.g. polyacrylic acid, polylactide acid (PLA), poly(glycolic acid) (PGA), polypropylene, polystyrene, polyolefin, polyamide, polycyanoacrylate, polyimide, polyethylenterephthalat (PET, PETG), polyethylene terephthalate (PETE), polytetramethylene glycol (PTG), or polyurethane as well as mixtures thereof. As used herein, a mixture refers to the use of different polymers within the same compound as well as in reference to block copolymers. In some cases, block copolymers are polymers wherein at least one section of a polymer is build up from monomers of another polymer. In some instances, the polymer moiety C comprises polyalkylene oxide. In some instances, the polymer moiety C comprises PEG. In some instances, the polymer moiety C comprises polyethylene imide (PEI) or hydroxy ethyl starch (HES).

[0379] In some instances, C is a PEG moiety. In some instances, the PEG moiety is conjugated at the 5′ terminus of the polynucleic acid molecule while the binding moiety is conjugated at the 3′ terminus of the polynucleic acid molecule. In some instances, the PEG moiety is conjugated at the 3′ terminus of the polynucleic acid molecule while the binding moiety is conjugated at the 5′ terminus of the polynucleic acid molecule. In some instances, the PEG moiety is conjugated to an internal site of the polynucleic acid molecule. In some instances, the PEG moiety, the binding moiety, or a combination thereof, are conjugated to an internal site of the polynucleic acid molecule. In some instances, the conjugation is a direct conjugation. In some instances, the conjugation is via native ligation.

[0380] In some embodiments, the polyalkylene oxide (e.g., PEG) is a polydispers or monodispers compound. In some instances, polydispers material comprises disperse distribution of different molecular weight of the material, characterized by mean weight (weight average) size and dispersity. In some instances, the monodisperse PEG comprises one size of molecules. In some embodiments, C is poly- or monodispersed polyalkylene oxide (e.g., PEG) and the indicated molecular weight represents an average of the molecular weight of the polyalkylene oxide, e.g., PEG, molecules.

[0381] In some embodiments, the molecular weight of the polyalkylene oxide (e.g., PEG) is about 200, 300, 400, 500, 600, 700, 800, 900, 1000, 1100, 1200, 1300, 1400, 1450, 1500, 1600, 1700, 1800, 1900, 2000, 2100, 2200, 2300, 2400, 2500, 2600, 2700, 2800, 2900, 3000, 3250, 3350, 3500, 3750, 4000, 4250, 4500, 4600, 4750, 5000, 5500, 6000, 6500, 7000, 7500, 8000, 10,000, 12,000, 20,000, 35,000, 40,000, 50,000, 60,000, or 100,000 Da.

[0382] In some embodiments, C is polyalkylene oxide (e.g., PEG) and has a molecular weight of about 200, 300, 400, 500, 600, 700, 800, 900, 1000, 1100, 1200, 1300, 1400, 1450, 1500, 1600, 1700, 1800, 1900, 2000, 2100, 2200, 2300, 2400, 2500, 2600, 2700, 2800, 2900, 3000, 3250, 3350, 3500, 3750, 4000, 4250, 4500, 4600, 4750, 5000, 5500, 6000, 6500, 7000, 7500, 8000, 10,000, 12,000, 20,000, 35,000, 40,000, 50,000, 60,000, or 100,000 Da. In some embodiments, C is PEG and has a molecular weight of about 200, 300, 400, 500, 600, 700, 800, 900, 1000, 1100, 1200, 1300, 1400, 1450, 1500, 1600, 1700, 1800, 1900, 2000, 2100, 2200, 2300, 2400, 2500, 2600, 2700, 2800, 2900, 3000, 3250, 3350, 3500, 3750, 4000, 4250, 4500, 4600, 4750, 5000, 5500, 6000, 6500, 7000, 7500, 8000, 10,000, 12,000, 20,000, 35,000, 40,000, 50,000, 60,000, or 100,000 Da. In some instances, the molecular weight of C is about 200 Da. In some instances, the molecular weight of C is about 300 Da. In some instances, the molecular weight of C is about 400 Da. In some instances, the molecular weight of C is about 500 Da. In some instances, the molecular weight of C is about 600 Da. In some instances, the molecular weight of C is about 700 Da. In some instances, the molecular weight of C is about 800 Da. In some instances, the molecular weight of C is about 900 Da. In some instances, the molecular weight of C is about 1000 Da. In some instances, the molecular weight of C is about 1100 Da. In some instances, the molecular weight of C is about 1200 Da. In some instances, the molecular weight of C is about 1300 Da. In some instances, the molecular weight of C is about 1400 Da. In some instances, the molecular weight of C is about 1450 Da. In some instances, the molecular weight of C is about 1500 Da. In some instances, the molecular weight of C is about 1600 Da. In some instances, the molecular weight of C is about 1700 Da. In some instances, the molecular weight of C is about 1800 Da. In some instances, the molecular weight of C is about 1900 Da. In some instances, the molecular weight of C is about 2000 Da. In some instances, the molecular weight of C is about 2100 Da. In some instances, the molecular weight of C is about 2200 Da. In some instances, the molecular weight of C is about 2300 Da. In some instances, the molecular weight of C is about 2400 Da. In some instances, the molecular weight of C is about 2500 Da. In some instances, the molecular weight of C is about 2600 Da. In some instances, the molecular weight of C is about 2700 Da. In some instances, the molecular weight of C is about 2800 Da. In some instances, the molecular weight of C is about 2900 Da. In some instances, the molecular weight of C is about 3000 Da. In some instances, the molecular weight of C is about 3250 Da. In some instances, the molecular weight of C is about 3350 Da. In some instances, the molecular weight of C is about 3500 Da. In some instances, the molecular weight of C is about 3750 Da. In some instances, the molecular weight of C is about 4000 Da. In some instances, the molecular weight of C is about 4250 Da. In some instances, the molecular weight of C is about 4500 Da. In some instances, the molecular weight of C is about 4600 Da. In some instances, the molecular weight of C is about 4750 Da. In some instances, the molecular weight of C is about 5000 Da. In some instances, the molecular weight of C is about 5500 Da. In some instances, the molecular weight of C is about 6000 Da. In some instances, the molecular weight of C is about 6500 Da. In some instances, the molecular weight of C is about 7000 Da. In some instances, the molecular weight of C is about 7500 Da. In some instances, the molecular weight of C is about 8000 Da. In some instances, the molecular weight of C is about 10,000 Da. In some instances, the molecular weight of C is about 12,000 Da. In some instances, the molecular weight of C is about 20,000 Da. In some instances, the molecular weight of C is about 35,000 Da. In some instances, the molecular weight of C is about 40,000 Da. In some instances, the molecular weight of C is about 50,000 Da. In some instances, the molecular weight of C is about 60,000 Da. In some instances, the molecular weight of C is about 100,000 Da.

[0383] In some embodiments, the polyalkylene oxide (e.g., PEG) is a discrete PEG, in which the discrete PEG is a polymeric PEG comprising more than one repeating ethylene oxide units. In some instances, a discrete PEG (dPEG) comprises from 2 to 60, from 2 to 50, or from 2 to 48 repeating ethylene oxide units. In some instances, a dPEG comprises about 2, 3, 4, 5, 6, 7, 8, 9, 10, 11, 12, 13, 14, 15, 16, 17, 18, 19, 20, 22, 24, 26, 28, 30, 35, 40, 42, 48, 50 or more repeating ethylene oxide units. In some instances, a dPEG comprises about 2 or more repeating ethylene oxide units. In some instances, a dPEG comprises about 3 or more repeating ethylene oxide units. In some instances, a dPEG comprises about 4 or more repeating ethylene oxide units. In some instances, a dPEG comprises about 5 or more repeating ethylene oxide units. In some instances, a dPEG comprises about 6 or more repeating ethylene oxide units. In some instances, a dPEG comprises about 7 or more repeating ethylene oxide units. In some instances, a dPEG comprises about 8 or more repeating ethylene oxide units. In some instances, a dPEG comprises about 9 or more repeating ethylene oxide units. In some instances, a dPEG comprises about 10 or more repeating ethylene oxide units. In some instances, a dPEG comprises about 11 or more repeating ethylene oxide units. In some instances, a dPEG comprises about 12 or more repeating ethylene oxide units. In some instances, a dPEG comprises about 13 or more repeating ethylene oxide units. In some instances, a dPEG comprises about 14 or more repeating ethylene oxide units. In some instances, a dPEG comprises about 15 or more repeating ethylene oxide units. In some instances, a dPEG comprises about 16 or more repeating ethylene oxide units. In some instances, a dPEG comprises about 17 or more repeating ethylene oxide units. In some instances, a dPEG comprises about 18 or more repeating ethylene oxide units. In some instances, a dPEG comprises about 19 or more repeating ethylene oxide units. In some instances, a dPEG comprises about 20 or more repeating ethylene oxide units. In some instances, a dPEG comprises about 22 or more repeating ethylene oxide units. In some instances, a dPEG comprises about 24 or more repeating ethylene oxide units. In some instances, a dPEG comprises about 26 or more repeating ethylene oxide units. In some instances, a dPEG comprises about 28 or more repeating ethylene oxide units. In some instances, a dPEG comprises about 30 or more repeating ethylene oxide units. In some instances, a dPEG comprises about 35 or more repeating ethylene oxide units. In some instances, a dPEG comprises about 40 or more repeating ethylene oxide units. In some instances, a dPEG comprises about 42 or more repeating ethylene oxide units. In some instances, a dPEG comprises about 48 or more repeating ethylene oxide units. In some instances, a dPEG comprises about 50 or more repeating ethylene oxide units. In some cases, a dPEG is synthesized as a single molecular weight compound from pure (e.g., about 95%, 98%, 99%, or 99.5%) staring material in a step-wise fashion. In some cases, a dPEG has a specific molecular weight, rather than an average molecular weight. In some cases, a dPEG described herein is a dPEG from Quanta Biodesign, LMD.

[0384] In some embodiments, the polymer moiety C comprises a cationic mucic acid-based polymer (cMAP). In some instances, cMPA comprises one or more subunit of at least one repeating subunit, and the subunit structure is represented as Formula (III):

[chemical structure]

[0385] wherein m is independently at each occurrence 1, 2, 3, 4, 5, 6, 7, 8, 9, or 10, preferably 4-6 or 5; and n is independently at each occurrence 1, 2, 3, 4, or 5. In some embodiments, m and n are, for example, about 10.

[0386] In some instances, cMAP is further conjugated to a PEG moiety, generating a cMAP-PEG copolymer, an mPEG-cMAP-PEGm triblock polymer, or a cMAP-PEG-cMAP triblock polymer. In some instances, the PEG moiety is in a range of from about 500 Da to about 50,000 Da. In some instances, the PEG moiety is in a range of from about 500 Da to about 1000 Da, greater than 1000 Da to about 5000 Da, greater than 5000 Da to about 10,000 Da, greater than 10,000 to about 25,000 Da, greater than 25,000 Da to about 50,000 Da, or any combination of two or more of these ranges.

[0387] In some instances, the polymer moiety C is cMAP-PEG copolymer, an mPEG-cMAP-PEGm triblock polymer, or a cMAP-PEG-cMAP triblock polymer. In some cases, the polymer moiety C is cMAP-PEG copolymer. In other cases, the polymer moiety C is an mPEG-cMAP-PEGm triblock polymer. In additional cases, the polymer moiety C is a cMAP-PEG-cMAP triblock polymer.

[0388] In some embodiments, the polymer moiety C is conjugated to the polynucleic acid molecule, the binding moiety, and optionally to the endosomolytic moiety as illustrated in FIG. 1.

### Endosomolytic Moiety

[0389] In some embodiments, a molecule of Formula (I): A-X—B—Y—C, further comprises an additional conjugating moiety. In some instances, the additional conjugating moiety is an endosomolytic moiety. In some cases, the endosomolytic moiety is a cellular compartmental release component, such as a compound capable of releasing from any of the cellular compartments known in the art, such as the endosome, lysosome, endoplasmic reticulum (ER), golgi apparatus, microtubule, peroxisome, or other vesicular bodies with the cell. In some cases, the endosomolytic moiety comprises an endosomolytic polypeptide, an endosomolytic polymer, an endosomolytic lipid, or an endosomolytic small molecule. In some cases, the endosomolytic moiety comprises an endosomolytic polypeptide. In other cases, the endosomolytic moiety comprises an endosomolytic polymer.

### Endosomolytic Polypeptides

[0390] In some embodiments, a molecule of Formula (I): A-X—B—Y—C, is further conjugated with an endosomolytic polypeptide. In some cases, the endosomolytic polypeptide is a pH-dependent membrane active peptide. In some cases, the endosomolytic polypeptide is an amphipathic polypeptide. In additional cases, the endosomolytic polypeptide is a peptidomimetic. In some instances, the endosomolytic polypeptide comprises INF, melittin, meucin, or their respective derivatives thereof. In some instances, the endosomolytic polypeptide comprises INF or its derivatives thereof. In other cases, the endosomolytic polypeptide comprises melittin or its derivatives thereof. In additional cases, the endosomolytic polypeptide comprises meucin or its derivatives thereof.

[0391] In some instances, INF7 is a 24 residue polypeptide those sequence comprises CGIFGEIEELIEEGLENLIDWGNA (SEQ ID NO: 2055), or GLFEAIEGFIENGWEGMIDGWYGC (SEQ ID NO: 2056). In some instances, INF7 or its derivatives comprise a sequence of:

(SEQ ID NO: 2057)
GLFEAIEGFIENGWEGMIWDYGSGSCG,
(SEQ ID NO: 2058)
GLFEAIEGFIENGWEGMIDG WYG-(PEG)6-NH2,
or
(SEQ ID NO: 2059)
GLFEAIEGFIENGWEGMIWDYG-SGSC-K(GalNAc)2.

[0392] In some cases, melittin is a 26 residue polypeptide those sequence comprises CLIGATLKVLATGLPTLISWIKNKRKQ (SEQ ID NO: 2060), or GIGAVLKVLTTGLPALISWIKRKRQQ (SEQ ID NO: 2061). In some instances, melittin comprises a polypeptide sequence as described in U.S. Pat. No. 8,501,930.

[0393] In some instances, meucin is an antimicrobial peptide (AMP) derived from the venom gland of the scorpion Mesobuthus eupeus. In some instances, meucin comprises of meucin-13 those sequence comprises IFGAIAGLLKNIF-NH₂ (SEQ ID NO: 2062) and meucin-18 those sequence comprises FFGHLFKLATKIIPSLFQ (SEQ ID NO: 2063).

[0394] In some instances, the endosomolytic polypeptide comprises a polypeptide in which its sequence is at least 50%, 60%, 70%, 80%, 90%, 95%, or 99% sequence identity to INF7 or its derivatives thereof, melittin or its derivatives thereof, or meucin or its derivatives thereof. In some instances, the endosomolytic moiety comprises INF7 or its derivatives thereof, melittin or its derivatives thereof, or meucin or its derivatives thereof.

[0395] In some instances, the endosomolytic moiety is INF7 or its derivatives thereof. In some cases, the endosomolytic moiety comprises a polypeptide having at least 50%, 55%, 60%, 65%, 70%, 75%, 80%, 85%, 90%, 95%, 96%, 97%, 98%, 99%, or 100% sequence identity to SEQ ID NOs: 2055-2059. In some cases, the endosomolytic moiety comprises a polypeptide having at least 50%, 55%, 60%, 65%, 70%, 75%, 80%, 85%, 90%, 95%, 96%, 97%, 98%, 99%, or 100% sequence identity to SEQ ID NO: 2055. In some cases, the endosomolytic moiety comprises a polypeptide having at least 50%, 55%, 60%, 65%, 70%, 75%, 80%, 85%, 90%, 95%, 96%, 97%, 98%, 99%, or 100% sequence identity to SEQ ID NO: 2056-2059. In some cases, the endosomolytic moiety comprises SEQ ID NO: 2055. In some cases, the endosomolytic moiety comprises SEQ ID NO: 2056-2059. In some cases, the endosomolytic moiety consists of SEQ ID NO: 2055. In some cases, the endosomolytic moiety consists of SEQ ID NO: 2056-2059.

[0396] In some instances, the endosomolytic moiety is melittin or its derivatives thereof. In some cases, the endosomolytic moiety comprises a polypeptide having at least 50%, 55%, 60%, 65%, 70%, 75%, 80%, 85%, 90%, 95%, 96%, 97%, 98%, 99%, or 100% sequence identity to SEQ ID NOs: 2060 or 2061. In some cases, the endosomolytic moiety comprises a polypeptide having at least 50%, 55%, 60%, 65%, 70%, 75%, 80%, 85%, 90%, 95%, 96%, 97%, 98%, 99%, or 100% sequence identity to SEQ ID NO: 2060. In some cases, the endosomolytic moiety comprises a polypeptide having at least 50%, 55%, 60%, 65%, 70%, 75%, 80%, 85%, 90%, 95%, 96%, 97%, 98%, 99%, or 100% sequence identity to SEQ ID NO: 2061. In some cases, the endosomolytic moiety comprises SEQ ID NO: 2060. In some cases, the endosomolytic moiety comprises SEQ ID NO: 2061. In some cases, the endosomolytic moiety consists of SEQ ID NO: 2060. In some cases, the endosomolytic moiety consists of SEQ ID NO: 2061.

[0397] In some instances, the endosomolytic moiety is meucin or its derivatives thereof. In some cases, the endosomolytic moiety comprises a polypeptide having at least 50%, 55%, 60%, 65%, 70%, 75%, 80%, 85%, 90%, 95%, 96%, 97%, 98%, 99%, or 100% sequence identity to SEQ ID NOs: 2062 or 2063. In some cases, the endosomolytic moiety comprises a polypeptide having at least 50%, 55%, 60%, 65%, 70%, 75%, 80%, 85%, 90%, 95%, 96%, 97%, 98%, 99%, or 100% sequence identity to SEQ ID NO: 2062. In some cases, the endosomolytic moiety comprises a polypeptide having at least 50%, 55%, 60%, 65%, 70%, 75%, 80%, 85%, 90%, 95%, 96%, 97%, 98%, 99%, or 100% sequence identity to SEQ ID NO: 2063. In some cases, the endosomolytic moiety comprises SEQ ID NO: 2062. In some cases, the endosomolytic moiety comprises SEQ ID NO: 2063. In some cases, the endosomolytic moiety consists of SEQ ID NO: 2062. In some cases, the endosomolytic moiety consists of SEQ ID NO: 2063.

[0398] In some instances, the endosomolytic moiety comprises a sequence as illustrated in Table 62.

TABLE 62

| | | | SEQ | |
|---|---|---|---|---|
| | | | ID | |
| Name | Origin | Amino Acid Sequence | NO: | Type |
| Pep-1 | NLS from Simian Virus | KETWWETWWTEWSQPKKKRKV | 2064 | Primary |
| | 40 large antigen and | | | amphipathic |
| | Reverse transcriptase of | | | |
| | HIV | | | |
| pVEC | VE-cadherin | LLIILRRRRIRKQAHAHSK | 2065 | Primary |
| | | | | amphipathic |
| VT5 | Synthetic peptide | DPKGDPKGVTVTVTVTVTGKGDP | 2066 | β-sheet |
| | | KPD | | amphipathic |
| C105Y | 1-antitrypsin | CSIPPEVKFNKPFVYLI | 2067 | — |
| Transportan | Galanin and mastoparan | GWTLNSAGYLLGKINLKALAALA | 2068 | Primary |
| | | KKIL | | amphipathic |
| TP10 | Galanin and mastoparan | AGYLLGKINLKALAALAKKIL | 2069 | Primary |
| | | | | amphipathic |
| MPG | A hydrofobic domain | GALFLGFLGAAGSTMGA | 2070 | β-sheet |
| | from the fusion | | | amphipathic |
| | sequence of HIV gp41 | | | |
| | and NLS of SV40 T | | | |
| | antigen | | | |
| gH625 | Glycoprotein gH of | HGLASTLTRWAHYNALIRAF | 2071 | Secondary |
| | HSV type I | | | amphipathic |
| | | | | α-helical |
| CADY | PPTG1 peptide | GLWRALWRLLRSLWRLLWRA | 2072 | Secondary |
| | | | | amphipathic |
| | | | | α-helical |
| GALA | Synthetic peptide | WEAALAEALAEALAEHLAEALAE | 2073 | Secondary |
| | | ALEALAA | | amphipathic |
| | | | | α-helical |
| INF | Influenza HA2 fusion | GLFEAIEGFIENGWEGMIDGWYGC | 2074 | Secondary |
| | peptide | | | amphipathic |
| | | | | α-helical/ |
| | | | | pH- |
| | | | | dependent |
| | | | | membrane |
| | | | | active |
| | | | | peptide |
| HA2E5- | Influenza HA2 subunit | GLFGAIAGFIENGWEGMIDGWYG | 2075 | Secondary |
| TAT | of influenza virus X31 | | | amphipathic |
| | strain fusion peptide | | | α-helical/ |
| | | | | PH- |
| | | | | dependent |
| | | | | membrane |
| | | | | active |
| | | | | peptide |
| HA2- | Influenza HA2 subunit | GLFGAIAGFIENGWEGMIDGRQIKI | 2076 | pH- |
| penetratin | of influenza virus X31 | WFQNRRMKW | | dependent |
| | strain fusion peptide | KK-amide | | membrane |
| | | | | active |
| | | | | peptide |
| HA-K4 | Influenza HA2 subunit | GLFGAIAGFIENGWEGMIDG- | 2077 | pH- |
| | of influenza virus X31 | SSKKKK | | dependent |
| | strain fusion peptide | | | membrane |
| | | | | active |
| | | | | peptide |
| HA2E4 | Influenza HA2 subunit | GLFEAIAGFIENGWEGMIDGGGYC | 2078 | pH- |
| | of influenza virus X31 | | | dependent |
| | strain fusion peptide | | | membrane |
| | | | | active |
| | | | | peptide |
| H5WYG | HA2 analogue | GLFHAIAHFIHGGWH | 2079 | pH- |
| | | GLIHGWYG | | dependent |
| | | | | membrane |
| | | | | active |
| | | | | peptide |
| GALA- | INF3 fusion peptide | GLFEAIEGFIENGWEGLAEALAEAL | 2080 | pH- |
| INF3- | | EALAA- | | dependent |
| (PEG)6-NH | | (PEG)6-NH2 | | membrane |
| | | | | active |
| | | | | peptide |
| CM18- | Cecropin-A-Melittin₂₋₁₂ | KWKLFKKIGAVLKVLTTG- | 2081 | pH- |
| TAT11 | (CM₁₈) fusion peptide | YGRKKRRQRRR | | dependent |
| | | | | membrane |
| | | | | active |
| | | | | peptide |

[0399] In some cases, the endosomolytic moiety comprises a Bak BH3 polypeptide which induces apoptosis through antagonization of suppressor targets such as Bcl-2 and/or Bcl-x_{L}. In some instances, the endosomolytic moiety comprises a Bak BH3 polypeptide described in Albarran, et al., “Efficient intracellular delivery of a pro-apoptotic peptide with a pH-responsive carrier,” Reactive & Functional Polymers 71: 261-265 (2011).

[0400] In some instances, the endosomolytic moiety comprises a polypeptide (e.g., a cell-penetrating polypeptide) as described in PCT Publication Nos. WO2013/166155 or WO2015/069587.

### Endosomolytic Polymers

[0401] In some embodiments, a molecule of Formula (I): A-X—B—Y—C, is further conjugated with an endosomolytic polymer. As used herein, an endosomolytic polymer comprises a linear, a branched network, a star, a comb, or a ladder type of polymer. In some instances, an endosomolytic polymer is a homopolymer or a copolymer comprising two ro more different types of monomers. In some cases, an endosomolytic polymer is a polycation polymer. In other cases, an endosomolytic polymer is a polyanion polymer.

[0402] In some instances, a polycation polymer comprises monomer units that are charge positive, charge neutral, or charge negative, with a net charge being positive. In other cases, a polycation polymer comprises a non-polymeric molecule that contains two or more positive charges. Exemplary cationic polymers include, but are not limited to, poly(L-lysine) (PLL), poly(L-arginine) (PLA), polyethyleneimine (PEI), poly[α-(4-aminobutyl)-L-glycolic acid](PAGA), 2-(dimethylamino)ethyl methacrylate (DMAEMA), or N,N-Diethylaminoethyl Methacrylate (DEAEMA).

[0403] In some cases, a polyanion polymer comprises monomer units that are charge positive, charge neutral, or charge negative, with a net charge being negative. In other cases, a polyanion polymer comprises a non-polymeric molecule that contains two or more negative charges. Exemplary anionic polymers include p(alkylacrylates) (e.g., poly(propyl acrylic acid) (PPAA)) or poly(N-isopropylacrylamide) (NIPAM). Additional examples include PP75, a L-phenylalanine-poly(L-lysine isophthalamide) polymer described in Khormaee, et al., “Edosomolytic anionic polymer for the cytoplasmic delivery of siRNAs in localized in vivo applications,” Advanced Functional Materials 23: 565-574 (2013).

[0404] In some embodiments, an endosomolytic polymer described herein is a pH-responsive endosomolytic polymer. A pH-responsive polymer comprises a polymer that increases in size (swell) or collapses depending on the pH of the environment. Polyacrylic acid and chitosan are examples of pH-responsive polymers.

[0405] In some instances, an endosomolytic moiety described herein is a membrane-disruptive polymer. In some cases, the membrane-disruptive polymer comprises a cationic polymer, a neutral or hydrophobic polymer, or an anionic polymer. In some instances, the membrane-disruptive polymer is a hydrophilic polymer.

[0406] In some instances, an endosomolytic moiety described herein is a pH-responsive membrane-disruptive polymer. Exemplary pH-responsive membrane-disruptive polymers include p(alkylacrylic acids), poly(N-isopropylacrylamide) (NIPAM) copolymers, succinylated p(glycidols), and p(β-malic acid) polymers.

[0407] In some instances, p(alkylacrylic acids) include poly(propylacrylic acid) (polyPAA), poly(methacrylic acid) (PMAA), poly(ethylacrylic acid) (PEAA), and poly(propyl acrylic acid) (PPAA). In some instances, a p(alkylacrylic acid) include a p(alkylacrylic acid) described in Jones, et al., Biochemistry Journal 372: 65-75 (2003).

[0408] In some embodiments, a pH-responsive membrane-disruptive polymer comprises p(butyl acrylate-co-methacrylic acid). (see Bulmus, et al., Journal of Controlled Release 93: 105-120 (2003); and Yessine, et al., Biochimica et Biophysica Acta 1613: 28-38 (2003))

[0409] In some embodiments, a pH-responsive membrane-disruptive polymer comprises p(styrene-alt-maleic anhydride). (see Henry, et al., Biomacromolecules 7: 2407-2414 (2006))

[0410] In some embodiments, a pH-responsive membrane-disruptive polymer comprises pyridyldisulfide acrylate (PDSA) polymers such as poly(MAA-co-PDSA), poly(EAA-co-PDSA), poly(PAA-co-PDSA), poly(MAA-co-BA-co-PDSA), poly(EAA-co-BA-co-PDSA), or poly(PAA-co-BA-co-PDSA) polymers. (see El-Sayed, et al., “Rational design of composition and activity correlations for pH-responsive and glutathione-reactive polymer therapeutics,” Journal of Controlled Release 104: 417-427 (2005); or Flanary et al., “Antigen delivery with poly(propylacrylic acid) conjugation enhanced MHC-1 presentation and T-cell activation,” Bioconjugate Chem. 20: 241-248 (2009))

[0411] In some embodiments, a pH-responsive membrane-disruptive polymer comprises a lytic polymer comprising the base structure of:

[chemical structure]

[0412] In some instances, an endosomolytic moiety described herein is further conjugated to an additional conjugate, e.g., a polymer (e.g., PEG), or a modified polymer (e.g., cholesterol-modified polymer).

[0413] In some instances, the additional conjugate comprises a detergent (e.g., Triton X-100). In some instances, an endosomolytic moiety described herein comprises a polymer (e.g., a poly(amidoamine)) conjugated with a detergent (e.g., Triton X-100). In some instances, an endosomolytic moiety described herein comprises poly(amidoamine)-Triton X-100 conjugate (Duncan, et al., “A polymer-Triton X-100 conjugate capable of pH-dependent red blood cell lysis: a model system illustrating the possibility of drug delivery within acidic intracellular compartments,” Journal of Drug Targeting 2: 341-347 (1994)).

### Endosomolytic Lipids

[0414] In some embodiments, the endosomolytic moiety is a lipid (e.g., a fusogenic lipid). In some embodiments, a molecule of Formula (I): A-X—B—Y—C, is further conjugated with an endosomolytic lipid (e.g., fusogenic lipid). Exemplary fusogenic lipids include 1,2-dileoyl-sn-3-phosphoethanolamine (DOPE), phosphatidylethanolamine (POPE), palmitoyloleoylphosphatidylcholine (POPC), (6Z,9Z,28Z,31Z)-heptatriaconta-6,9,28,31-tetraen-19-ol (Di-Lin), N-methyl(2,2-di((9Z,12Z)-octadeca-9,12-dienyl)-1,3-dioxolan-4-yl)methanamine (DLin-k-DMA) and N-methyl-2-(2,2-di((9Z,12Z)-octadeca-9,12-dienyl)-1,3-dioxolan-4-yl)ethanamine (XTC).

[0415] In some instances, an endosomolytic moiety is a lipid (e.g., a fusogenic lipid) described in PCT Publication No. WO09/126,933.

### Endosomolytic Small Molecules

[0416] In some embodiments, the endosomolytic moiety is a small molecule. In some embodiments, a molecule of Formula (I): A-X—B—Y—C, is further conjugated with an endosomolytic small molecule. Exemplary small molecules suitable as endosomolytic moieties include, but are not limited to, quinine, chloroquine, hydroxychloroquines, amodiaquins (carnoquines), amopyroquines, primaquines, mefloquines, nivaquines, halofantrines, quinone imines, or a combination thereof. In some instances, quinoline endosomolytic moieties include, but are not limited to, 7-chloro-4-(4-diethylamino-1-methylbutyl-amino)quinoline (chloroquine); 7-chloro-4-(4-ethyl-(2-hydroxyethyl)-amino-1-methylbutyl-amino)quinoline (hydroxychloroquine); 7-fluoro-4-(4-diethylamino-1-methylbutyl-amino)quinoline; 4-(4-diethylamino-1-methylbutylamino) quinoline; 7-hydroxy-4-(4-diethyl-amino-1-methylbutylamino)quinoline; 7-chloro-4-(4-diethylamino-1-butylamino)quinoline (desmethylchloroquine); 7-fluoro-4-(4-diethylamino-1-butylamino)quinoline); 4-(4-diethyl-amino-1-butylamino)quinoline; 7-hydroxy-4-(4-diethylamino-1-butylamino)quinoline; 7-chloro-4-(1-carboxy-4-diethylamino-1-butylamino)quinoline; 7-fluoro-4-(1-carboxy-4-diethyl-amino-1-butylamino)quinoline; 4-(1-carboxy-4-diethylamino-1-butylamino) quinoline; 7-hydroxy-4-(1-carboxy-4-diethylamino-1-butylamino)quinoline; 7-chloro-4-(1-carboxy-4-diethylamino-1-methylbutylamino)quinoline; 7-fluoro-4-(1-carboxy-4-diethyl-amino-1-methylbutylamino)quinoline; 4-(1-carboxy-4-diethylamino-1-methylbutylamino)quinoline; 7-hydroxy-4-(1-carboxy-4-diethylamino-1-methylbutylamino)quinoline; 7-fluoro-4-(4-ethyl-(2-hydroxyethyl)-amino-1-methylbutylamino)quinoline; 4-(4-ethyl-(2-hydroxy-ethyl)-amino-1-methylbutylamino-)quinoline; 7-hydroxy-4-(4-ethyl-(2-hydroxyethyl)-amino-1-methylbutylamino)quinoline; hydroxychloroquine phosphate; 7-chloro-4-(4-ethyl-(2-hydroxyethyl-1)-amino-1-butylamino)quinoline (desmethylhydroxychloroquine); 7-fluoro-4-(4-ethyl-(2-hydroxyethyl)-amino-1-butylamino)quinoline; 4-(4-ethyl-(2-hydroxyethyl)-amino-1-butylamino)quinoline; 7-hydroxy-4-(4-ethyl-(2-hydroxyethyl)-amino-1-butylamino) quinoline; 7-chloro-4-(1-carboxy-4-ethyl-(2-hydroxyethyl)-amino-1-butylamino)quinoline; 7-fluoro-4-(1-carboxy-4-ethyl-(2-hydroxyethyl)-amino-1-butylamino)quinoline; 4-(1-carboxy-4-ethyl-(2-hydroxyethyl)-amino-1-butylamino)quinoline; 7-hydroxy-4-(1-carboxy-4-ethyl-(2-hydroxyethyl)-amino-1-butylamino)quinoline; 7-chloro-4-(1-carboxy-4-ethyl-(2-hydroxyethyl)-amino-1-methylbutylamino)quinoline; 7-fluoro-4-(1-carboxy-4-ethyl-(2-hydroxyethyl)-amino-1-methylbutylamino)quinoline; 4-(1-carboxy-4-ethyl-(2-hydroxyethyl)-amino-1-methylbutylamino)quinoline; 7-hydroxy-4-(1-carboxy-4-ethyl-(2-hydroxyethyl)-amino-1-methylbutylamino)quinoline; 8-[(4-aminopentyl)amino-6-methoxydihydrochloride quinoline; 1-acetyl-1,2,3,4-tetrahydroquinoline; 8-[(4-aminopentyl)amino]-6-methoxyquinoline dihydrochloride; 1-butyryl-1,2,3,4-tetrahydroquinoline; 3-chloro-4-(4-hydroxy-alpha,alpha′-bis(2-methyl-1-pyrrolidinyl)-2,5-xylidinoquinoline, 4-[(4-diethyl-amino)-1-methylbutyl-amino]-6-methoxyquinoline; 3-fluoro-4-(4-hydroxy-alpha,alpha′-bis(2-methyl-1-pyrrolidinyl)-2,5-xylidinoquinoline, 4-[(4-diethylamino)-1-methylbutyl-amino]-6-methoxyquinoline; 4-(4-hydroxy-alpha,alpha′-bis(2-methyl-1-pyrrolidinyl)-2,5-xylidinoquinoline; 4-[(4-diethylamino)-1-methylbutyl-amino]-6-methoxyquinoline; 3,4-dihydro-1-(2H)-quinolinecarboxyaldehyde; 1,1′-pentamethylene diquinoleinium diiodide; 8-quinolinol sulfate and amino, aldehyde, carboxylic, hydroxyl, halogen, keto, sulfhydryl and vinyl derivatives or analogs thereof. In some instances, an endosomolytic moiety is a small molecule described in Naisbitt et al (1997, J Pharmacol Exp Therapy 280:884-893) and in U.S. Pat. No. 5,736,557.

### Formula (I) Molecule-Endosomolytic Moiety Conjugates

[0417] In some embodiments, one or more endosomolytic moieties are conjugated to a molecule comprising at least one binding moiety, at least one polynucleotide, at least one polymer, or any combinations thereof. In some instances, the endosomolytic moiety is conjugated according to Formula (II):

(A-X—B—Y—C_{c})-L-D Formula II

wherein,
[0418] A is a binding moiety;
[0419] B is a polynucleotide;
[0420] C is a polymer;
[0421] X is a bond or first linker;
[0422] Y is a bond or second linker;
[0423] L is a bond or third linker;
[0424] D is an endosomolytic moiety; and
[0425] c is an integer between 0 and 1; and
   wherein the polynucleotide comprises at least one 2′ modified nucleotide, at least one modified internucleotide linkage, or at least one inverted abasic moiety; and D is conjugated anywhere on A, B, or C.

[0426] In some embodiments, A and C are not attached to B at the same terminus.

[0427] In some embodiments, the at least one 2′ modified nucleotide comprises 2′-O-methyl, 2′-O-methoxyethyl (2′-O-MOE), 2′-O-aminopropyl, 2′-deoxy, T-deoxy-2′-fluoro, 2′-O-aminopropyl (2′-O-AP), 2′-O-dimethylaminoethyl (2′-O-DMAOE), 2′-O-dimethylaminopropyl (2′-O-DMAP), T-O-dimethylaminoethyloxyethyl (2′-O-DMAEOE), or 2′-O—N-methylacetamido (2′-O-NMA) modified nucleotide. In some instances, the at least one 2′ modified nucleotide comprises locked nucleic acid (LNA) or ethylene nucleic acid (ENA). In some cases, the at least one modified internucleotide linkage comprises a phosphorothioate linkage or a phosphorodithioate linkage. In some embodiments, the polynucleotide comprises a first polynucleotide and a second polynucleotide hybridized to the first polynucleotide to form a double-stranded polynucleic acid molecule. In some instances, the second polynucleotide comprises at least one modification. In some cases, the first polynucleotide and the second polynucleotide are RNA molecules. In some cases, the first polynucleotide and the second polynucleotide are siRNA molecules. In some embodiments, X, Y, and L are independently a bond or a non-polymeric linker group. In some instances, A is an antibody or binding fragment thereof. In some instances, the antibody or binding fragment thereof comprises a humanized antibody or binding fragment thereof, chimeric antibody or binding fragment thereof, monoclonal antibody or binding fragment thereof, monovalent Fab′, divalent Fab2, single-chain variable fragment (scFv), diabody, minibody, nanobody, single-domain antibody (sdAb), or camelid antibody or binding fragment thereof. In some cases, C is polyethylene glycol.

[0428] In some instances, the endosomolytic moiety comprises a polypeptide, a polymer, a lipid, or a small molecule. In some instances, the endosomolytic moiety is an endosomolytic polypeptide. In some cases, the endosomolytic moiety is an endosomolytic polymer. In other cases, the endosomolytic moiety is an endosomolytic lipid. In additional cases, the endosomolytic moiety is an endosomolytic small molecule.

[0429] In some instances, the endosomolytic moiety is INF7 or its derivatives thereof. In some cases, the endosomolytic moiety comprises a polypeptide having at least 50%, 55%, 60%, 65%, 70%, 75%, 80%, 85%, 90%, 95%, 96%, 97%, 98%, 99%, or 100% sequence identity to SEQ ID NOs: 2055. In some cases, the endosomolytic moiety comprises SEQ ID NO: 2055. In some cases, the endosomolytic moiety consists of SEQ ID NO: 2055.

[0430] In some instances, the endosomolytic moiety is melittin or its derivatives thereof. In some cases, the endosomolytic moiety comprises a polypeptide having at least 50%, 55%, 60%, 65%, 70%, 75%, 80%, 85%, 90%, 95%, 96%, 97%, 98%, 99%, or 100% sequence identity to SEQ ID NOs: 2060. In some cases, the endosomolytic moiety comprises SEQ ID NO: 2060. In some cases, the endosomolytic moiety consists of SEQ ID NO: 2060.

[0431] In some instances, the endosomolytic moiety is a sequence as illustrated in Table 62.

[0432] In additional cases, the endosomolytic moiety is an endosomolytic polymer, such as for example, a pH-responsive endosomolytic polymer, a membrane-disruptive polymer, a polycation polymer, a polyanion polymer, a pH-responsive membrane-disruptive polymer, or a combination thereof. In additional cases, the endosomolytic moiety comprises a p(alkylacrylic acid) polymer, a p(butyl acrylate-co-methacrylic acid) polymer, a p(styrene-alt-maleic anhydride) polymer, a pyridyldisulfide acrylate (PDSA) polymer, a polymer-PEG conjugate, a polymer-detergent conjugate, or a combination thereof.

[0433] In some embodiments, the endosomolytic moiety conjugate is according to Formula (IIa):

D-L-A-X—B—Y—C_{c} Formula IIa

wherein,
[0434] A is a binding moiety;
[0435] B is a polynucleotide;
[0436] C is a polymer;
[0437] X is a bond or first linker;
[0438] Y is a bond or second linker;
[0439] L is a bond or third linker;
[0440] D is an endosomolytic moiety; and
[0441] c is an integer of 1; and
   wherein the polynucleotide comprises at least one 2′ modified nucleotide, at least one modified internucleotide linkage, or at least one inverted abasic moiety.

[0442] In some embodiments, A and C are not attached to B at the same terminus.

[0443] In some embodiments, the at least one 2′ modified nucleotide comprises 2′-O-methyl, 2′-O-methoxyethyl (2′-O-MOE), 2′-O-aminopropyl, 2′-deoxy, T-deoxy-2′-fluoro, 2′-O-aminopropyl (2-O-AP), 2′-O-dimethylaminoethyl (2′-O-DMAOE), 2′-O-dimethylaminopropyl (2′-O-DMAP), T-O-dimethylaminoethyloxyethyl (2′-O-DMAEOE), or 2′-O—N-methylacetamido (2′-O-NMA) modified nucleotide. In some instances, the at least one 2′ modified nucleotide comprises locked nucleic acid (LNA) or ethylene nucleic acid (ENA). In some cases, the at least one modified internucleotide linkage comprises a phosphorothioate linkage or a phosphorodithioate linkage. In some embodiments, the polynucleotide comprises a first polynucleotide and a second polynucleotide hybridized to the first polynucleotide to form a double-stranded polynucleic acid molecule. In some instances, the second polynucleotide comprises at least one modification. In some cases, the first polynucleotide and the second polynucleotide are RNA molecules. In some cases, the first polynucleotide and the second polynucleotide are siRNA molecules. In some embodiments, X, Y, and L are independently a bond or a non-polymeric linker group. In some instances, A is an antibody or binding fragment thereof. In some instances, the antibody or binding fragment thereof comprises a humanized antibody or binding fragment thereof, chimeric antibody or binding fragment thereof, monoclonal antibody or binding fragment thereof, monovalent Fab′, divalent Fab2, single-chain variable fragment (scFv), diabody, minibody, nanobody, single-domain antibody (sdAb), or camelid antibody or binding fragment thereof. In some cases, C is polyethylene glycol.

[0444] In some instances, the endosomolytic moiety comprises a polypeptide, a polymer, a lipid, or a small molecule. In some instances, the endosomolytic moiety is an endosomolytic polypeptide. In some cases, the endosomolytic moiety is an endosomolytic polymer. In other cases, the endosomolytic moiety is an endosomolytic lipid. In additional cases, the endosomolytic moiety is an endosomolytic small molecule.

[0445] In some instances, the endosomolytic moiety is INF7 or its derivatives thereof. In some cases, the endosomolytic moiety comprises a polypeptide having at least 50%, 55%, 60%, 65%, 70%, 75%, 80%, 85%, 90%, 95%, 96%, 97%, 98%, 99%, or 100% sequence identity to SEQ ID NOs: 2055. In some cases, the endosomolytic moiety comprises SEQ ID NO: 2055. In some cases, the endosomolytic moiety consists of SEQ ID NO: 2055.

[0446] In some instances, the endosomolytic moiety is melittin or its derivatives thereof. In some cases, the endosomolytic moiety comprises a polypeptide having at least 50%, 55%, 60%, 65%, 70%, 75%, 80%, 85%, 90%, 95%, 96%, 97%, 98%, 99%, or 100% sequence identity to SEQ ID NOs: 2060. In some cases, the endosomolytic moiety comprises SEQ ID NO: 2060. In some cases, the endosomolytic moiety consists of SEQ ID NO: 2060.

[0447] In some instances, the endosomolytic moiety is a sequence as illustrated in Table 62.

[0448] In additional cases, the endosomolytic moiety is an endosomolytic polymer, such as for example, a pH-responsive endosomolytic polymer, a membrane-disruptive polymer, a polycation polymer, a polyanion polymer, a pH-responsive membrane-disruptive polymer, or a combination thereof. In additional cases, the endosomolytic moiety comprises a p(alkylacrylic acid) polymer, a p(butyl acrylate-co-methacrylic acid) polymer, a p(styrene-alt-maleic anhydride) polymer, a pyridyldisulfide acrylate (PDSA) polymer, a polymer-PEG conjugate, a polymer-detergent conjugate, or a combination thereof.

[0449] In some instances, the endosomolytic moiety conjugate is according to Formula (IIb):

A-X—B-L-D Formula IIb

wherein,
[0450] A is a binding moiety;
[0451] B is a polynucleotide;
[0452] X is a bond or first linker;
[0453] L is a bond or third linker; and
[0454] D is an endosomolytic moiety; and
   wherein the polynucleotide comprises at least one 2′ modified nucleotide, at least one modified internucleotide linkage, or at least one inverted abasic moiety.

[0455] In some embodiments, A and C are not attached to B at the same terminus.

[0456] In some embodiments, the at least one 2′ modified nucleotide comprises 2′-O-methyl, 2′-O-methoxyethyl (2′-O-MOE), 2′-O-aminopropyl, 2′-deoxy, T-deoxy-2′-fluoro, 2′-O-aminopropyl (2′-O-AP), 2′-O-dimethylaminoethyl (2′-O-DMAOE), 2′-O-dimethylaminopropyl (2′-O-DMAP), T-O-dimethylaminoethyloxyethyl (2′-O-DMAEOE), or 2′-O—N-methylacetamido (2′-O-NMA) modified nucleotide. In some instances, the at least one 2′ modified nucleotide comprises locked nucleic acid (LNA) or ethylene nucleic acid (ENA). In some cases, the at least one modified internucleotide linkage comprises a phosphorothioate linkage or a phosphorodithioate linkage. In some embodiments, the polynucleotide comprises a first polynucleotide and a second polynucleotide hybridized to the first polynucleotide to form a double-stranded polynucleic acid molecule. In some instances, the second polynucleotide comprises at least one modification. In some cases, the first polynucleotide and the second polynucleotide are RNA molecules. In some cases, the first polynucleotide and the second polynucleotide are siRNA molecules. In some embodiments, X and L are independently a bond or a non-polymeric linker group. In some instances, A is an antibody or binding fragment thereof. In some instances, the antibody or binding fragment thereof comprises a humanized antibody or binding fragment thereof, chimeric antibody or binding fragment thereof, monoclonal antibody or binding fragment thereof, monovalent Fab′, divalent Fab2, single-chain variable fragment (scFv), diabody, minibody, nanobody, single-domain antibody (sdAb), or camelid antibody or binding fragment thereof. In some cases, C is polyethylene glycol.

[0457] In some instances, the endosomolytic moiety comprises a polypeptide, a polymer, a lipid, or a small molecule. In some instances, the endosomolytic moiety is an endosomolytic polypeptide. In some cases, the endosomolytic moiety is an endosomolytic polymer. In other cases, the endosomolytic moiety is an endosomolytic lipid. In additional cases, the endosomolytic moiety is an endosomolytic small molecule.

[0458] In some instances, the endosomolytic moiety is INF7 or its derivatives thereof. In some cases, the endosomolytic moiety comprises a polypeptide having at least 50%, 55%, 60%, 65%, 70%, 75%, 80%, 85%, 90%, 95%, 96%, 97%, 98%, 99%, or 100% sequence identity to SEQ ID NOs: 2055. In some cases, the endosomolytic moiety comprises SEQ ID NO: 2055. In some cases, the endosomolytic moiety consists of SEQ ID NO: 2055.

[0459] In some instances, the endosomolytic moiety is melittin or its derivatives thereof. In some cases, the endosomolytic moiety comprises a polypeptide having at least 50%, 55%, 60%, 65%, 70%, 75%, 80%, 85%, 90%, 95%, 96%, 97%, 98%, 99%, or 100% sequence identity to SEQ ID NOs: 2060. In some cases, the endosomolytic moiety comprises SEQ ID NO: 2060. In some cases, the endosomolytic moiety consists of SEQ ID NO: 2060.

[0460] In some instances, the endosomolytic moiety is a sequence as illustrated in Table 62.

[0461] In additional cases, the endosomolytic moiety is an endosomolytic polymer, such as for example, a pH-responsive endosomolytic polymer, a membrane-disruptive polymer, a polycation polymer, a polyanion polymer, a pH-responsive membrane-disruptive polymer, or a combination thereof. In additional cases, the endosomolytic moiety comprises a p(alkylacrylic acid) polymer, a p(butyl acrylate-co-methacrylic acid) polymer, a p(styrene-alt-maleic anhydride) polymer, a pyridyldisulfide acrylate (PDSA) polymer, a polymer-PEG conjugate, a polymer-detergent conjugate, or a combination thereof.

[0462] In some instances, the endosomolytic moiety conjugate is according to Formula (IIc):

A-X—B—Y—C_{c}-L-D Formula IIc

wherein,
[0463] A is a binding moiety;
[0464] B is a polynucleotide;
[0465] C is a polymer;
[0466] X is a bond or first linker;
[0467] Y is a bond or second linker;
[0468] L is a bond or third linker;
[0469] D is an endosomolytic moiety; and
[0470] c is an integer of 1; and
   wherein the polynucleotide comprises at least one 2′ modified nucleotide, at least one modified internucleotide linkage, or at least one inverted abasic moiety.

[0471] In some embodiments, A and C are not attached to B at the same terminus.

[0472] In some embodiments, the at least one 2′ modified nucleotide comprises 2′-O-methyl, 2′-O-methoxyethyl (2′-O-MOE), 2′-O-aminopropyl, 2′-deoxy, T-deoxy-2′-fluoro, 2′-O-aminopropyl (2′-O-AP), 2′-O-dimethylaminoethyl (2′-O-DMAOE), 2′-O-dimethylaminopropyl (2′-O-DMAP), T-O-dimethylaminoethyloxyethyl (2′-O-DMAEOE), or 2′-O—N-methylacetamido (2′-O-NMA) modified nucleotide. In some instances, the at least one 2′ modified nucleotide comprises locked nucleic acid (LNA) or ethylene nucleic acid (ENA). In some cases, the at least one modified internucleotide linkage comprises a phosphorothioate linkage or a phosphorodithioate linkage. In some embodiments, the polynucleotide comprises a first polynucleotide and a second polynucleotide hybridized to the first polynucleotide to form a double-stranded polynucleic acid molecule. In some instances, the second polynucleotide comprises at least one modification. In some cases, the first polynucleotide and the second polynucleotide are RNA molecules. In some cases, the first polynucleotide and the second polynucleotide are siRNA molecules. In some embodiments, X, Y, and L are independently a bond or a non-polymeric linker group. In some instances, A is an antibody or binding fragment thereof. In some instances, the antibody or binding fragment thereof comprises a humanized antibody or binding fragment thereof, chimeric antibody or binding fragment thereof, monoclonal antibody or binding fragment thereof, monovalent Fab′, divalent Fab2, single-chain variable fragment (scFv), diabody, minibody, nanobody, single-domain antibody (sdAb), or camelid antibody or binding fragment thereof. In some cases, C is polyethylene glycol.

[0473] In some instances, the endosomolytic moiety comprises a polypeptide, a polymer, a lipid, or a small molecule. In some instances, the endosomolytic moiety is an endosomolytic polypeptide. In some cases, the endosomolytic moiety is an endosomolytic polymer. In other cases, the endosomolytic moiety is an endosomolytic lipid. In additional cases, the endosomolytic moiety is an endosomolytic small molecule.

[0474] In some instances, the endosomolytic moiety is INF7 or its derivatives thereof. In some cases, the endosomolytic moiety comprises a polypeptide having at least 50%, 55%, 60%, 65%, 70%, 75%, 80%, 85%, 90%, 95%, 96%, 97%, 98%, 99%, or 100% sequence identity to SEQ ID NOs: 2055. In some cases, the endosomolytic moiety comprises SEQ ID NO: 2055. In some cases, the endosomolytic moiety consists of SEQ ID NO: 2055.

[0475] In some instances, the endosomolytic moiety is melittin or its derivatives thereof. In some cases, the endosomolytic moiety comprises a polypeptide having at least 50%, 55%, 60%, 65%, 70%, 75%, 80%, 85%, 90%, 95%, 96%, 97%, 98%, 99%, or 100% sequence identity to SEQ ID NOs: 2060. In some cases, the endosomolytic moiety comprises SEQ ID NO: 2060. In some cases, the endosomolytic moiety consists of SEQ ID NO: 2060.

[0476] In some instances, the endosomolytic moiety is a sequence as illustrated in Table 62.

[0477] In additional cases, the endosomolytic moiety is an endosomolytic polymer, such as for example, a pH-responsive endosomolytic polymer, a membrane-disruptive polymer, a polycation polymer, a polyanion polymer, a pH-responsive membrane-disruptive polymer, or a combination thereof. In additional cases, the endosomolytic moiety comprises a p(alkylacrylic acid) polymer, a p(butyl acrylate-co-methacrylic acid) polymer, a p(styrene-alt-maleic anhydride) polymer, a pyridyldisulfide acrylate (PDSA) polymer, a polymer-PEG conjugate, a polymer-detergent conjugate, or a combination thereof.

[0478] In some instances, the endosomolytic moiety conjugate is according to Formula (IId):

A-L-D-X—B—Y—C_{c} Formula IId

wherein,
[0479] A is a binding moiety;
[0480] B is a polynucleotide;
[0481] C is a polymer;
[0482] X is a bond or first linker;
[0483] Y is a bond or second linker;
[0484] L is a bond or third linker;
[0485] D is an endosomolytic moiety; and
[0486] c is an integer of 1; and
   wherein the polynucleotide comprises at least one 2′ modified nucleotide, at least one modified internucleotide linkage, or at least one inverted abasic moiety.

[0487] In some embodiments, A and C are not attached to B at the same terminus.

[0488] In some embodiments, the at least one 2′ modified nucleotide comprises 2′-O-methyl, 2′-O-methoxyethyl (2′-O-MOE), 2′-O-aminopropyl, 2′-deoxy, T-deoxy-2′-fluoro, 2′-O-aminopropyl (2′-O-AP), 2′-O-dimethylaminoethyl (2′-O-DMAOE), 2′-O-dimethylaminopropyl (2′-O-DMAP), T-O-dimethylaminoethyloxyethyl (2′-O-DMAEOE), or 2′-O—N-methylacetamido (2′-O-NMA) modified nucleotide. In some instances, the at least one 2′ modified nucleotide comprises locked nucleic acid (LNA) or ethylene nucleic acid (ENA). In some cases, the at least one modified internucleotide linkage comprises a phosphorothioate linkage or a phosphorodithioate linkage. In some embodiments, the polynucleotide comprises a first polynucleotide and a second polynucleotide hybridized to the first polynucleotide to form a double-stranded polynucleic acid molecule. In some instances, the second polynucleotide comprises at least one modification. In some cases, the first polynucleotide and the second polynucleotide are RNA molecules. In some cases, the first polynucleotide and the second polynucleotide are siRNA molecules. In some embodiments, X, Y, and L are independently a bond or a non-polymeric linker group. In some instances, A is an antibody or binding fragment thereof. In some instances, the antibody or binding fragment thereof comprises a humanized antibody or binding fragment thereof, chimeric antibody or binding fragment thereof, monoclonal antibody or binding fragment thereof, monovalent Fab′, divalent Fab2, single-chain variable fragment (scFv), diabody, minibody, nanobody, single-domain antibody (sdAb), or camelid antibody or binding fragment thereof. In some cases, C is polyethylene glycol.

[0489] In some instances, the endosomolytic moiety comprises a polypeptide, a polymer, a lipid, or a small molecule. In some instances, the endosomolytic moiety is an endosomolytic polypeptide. In some cases, the endosomolytic moiety is an endosomolytic polymer. In other cases, the endosomolytic moiety is an endosomolytic lipid. In additional cases, the endosomolytic moiety is an endosomolytic small molecule.

[0490] In some instances, the endosomolytic moiety is INF7 or its derivatives thereof. In some cases, the endosomolytic moiety comprises a polypeptide having at least 50%, 55%, 60%, 65%, 70%, 75%, 80%, 85%, 90%, 95%, 96%, 97%, 98%, 99%, or 100% sequence identity to SEQ ID NOs: 2055. In some cases, the endosomolytic moiety comprises SEQ ID NO: 2055. In some cases, the endosomolytic moiety consists of SEQ ID NO: 2055.

[0491] In some instances, the endosomolytic moiety is melittin or its derivatives thereof. In some cases, the endosomolytic moiety comprises a polypeptide having at least 50%, 55%, 60%, 65%, 70%, 75%, 80%, 85%, 90%, 95%, 96%, 97%, 98%, 99%, or 100% sequence identity to SEQ ID NOs: 2060. In some cases, the endosomolytic moiety comprises SEQ ID NO: 2060. In some cases, the endosomolytic moiety consists of SEQ ID NO: 2060.

[0492] In some instances, the endosomolytic moiety is a sequence as illustrated in Table 62.

[0493] In additional cases, the endosomolytic moiety is an endosomolytic polymer, such as for example, a pH-responsive endosomolytic polymer, a membrane-disruptive polymer, a polycation polymer, a polyanion polymer, a pH-responsive membrane-disruptive polymer, or a combination thereof. In additional cases, the endosomolytic moiety comprises a p(alkylacrylic acid) polymer, a p(butyl acrylate-co-methacrylic acid) polymer, a p(styrene-alt-maleic anhydride) polymer, a pyridyldisulfide acrylate (PDSA) polymer, a polymer-PEG conjugate, a polymer-detergent conjugate, or a combination thereof.

### Linkers

[0494] In some embodiments, a linker described herein is a cleavable linker or a non-cleavable linker. In some instances, the linker is a cleavable linker. In some instances, the linker is an acid cleavable linker. In some instances, the linker is a non-cleavable linker. In some instances, the linker includes a C₁-C₆ alkyl group (e.g., a C₅, C₄, C₃, C₂, or C₁ alkyl group). In some instances, the linker includes homobifunctional cross linkers, heterobifunctional cross linkers, and the like. In some instances, the liker is a traceless linker (or a zero-length linker). In some instances, the linker is a non-polymeric linker. In some cases, the linker is a non-peptide linker or a linker that does not contain an amino acid residue.

[0495] In some instances, the linker comprises a homobifuctional linker. Exemplary homobifuctional linkers include, but are not limited to, Lomant's reagent dithiobis (succinimidylpropionate) DSP, 3′3′-dithiobis(sulfosuccinimidyl proprionate (DTSSP), disuccinimidyl suberate (DSS), bis(sulfosuccinimidyl)suberate (BS), disuccinimidyl tartrate (DST), disulfosuccinimidyl tartrate (sulfo DST), ethylene glycobis(succinimidylsuccinate) (EGS), disuccinimidyl glutarate (DSG), N,N′-disuccinimidyl carbonate (DSC), dimethyl adipimidate (DMA), dimethyl pimelimidate (DMP), dimethyl suberimidate (DMS), dimethyl-3,3′-dithiobispropionimidate (DTBP), 1,4-di-3′-(2′-pyridyldithio)propionamido)butane (DPDPB), bismaleimidohexane (BMH), aryl halide-containing compound (DFDNB), such as e.g. 1,5-difluoro-2,4-dinitrobenzene or 1,3-difluoro-4,6-dinitrobenzene, 4,4′-difluoro-3,3′-dinitrophenylsulfone (DFDNPS), bis-[β-(4-azidosalicylamido)ethyl]disulfide (BASED), formaldehyde, glutaraldehyde, 1,4-butanediol diglycidyl ether, adipic acid dihydrazide, carbohydrazide, o-toluidine, 3,3′-dimethylbenzidine, benzidine, α,α′-p-diaminodiphenyl, diiodo-p-xylene sulfonic acid, N,N′-ethylene-bis(iodoacetamide), or N,N′-hexamethylene-bis(iodoacetamide).

[0496] In some embodiments, the linker comprises a heterobifunctional linker. Exemplary heterobifunctional linker include, but are not limited to, amine-reactive and sulfhydryl cross-linkers such as N-succinimidyl 3-(2-pyridyldithio)propionate (sPDP), long-chain N-succinimidyl 3-(2-pyridyldithio)propionate (LC-sPDP), water-soluble-long-chain N-succinimidyl 3-(2-pyridyldithio) propionate (sulfo-LC-sPDP), succinimidyloxycarbonyl-a-methyl-a-(2-pyridyldithio)toluene (sMPT), sulfosuccinimidyl-6-[α-methyl-α-(2-pyridyldithio)toluamido]hexanoate (sulfo-LC-sMPT), succinimidyl-4-(N-maleimidomethyl)cyclohexane-1-carboxylate (sMCC), sulfosuccinimidyl-4-(N-maleimidomethyl)cyclohexane-1-carboxylate (sulfo-sMCC), m-maleimidobenzoyl-N-hydroxysuccinimide ester (MBs), m-maleimidobenzoyl-N-hydroxysulfosuccinimide ester (sulfo-MBs), N-succinimidyl(4-iodoacteyl)aminobenzoate (sIAB), sulfosuccinimidyl(4-iodoacteyl)aminobenzoate (sulfo-sIAB), succinimidyl-4-(p-maleimidophenyl)butyrate (sMPB), sulfosuccinimidyl-4-(p-maleimidophenyl)butyrate (sulfo-sMPB), N-(y-maleimidobutyryloxy)succinimide ester (GMBs), N-(y-maleimidobutyryloxy)sulfosuccinimide ester (sulfo-GMBs), succinimidyl 6-((iodoacetyl)amino)hexanoate (sIAX), succinimidyl 6-[6-(((iodoacetyl)amino)hexanoyl)amino]hexanoate (sIAXX), succinimidyl 4-(((iodoacetyl)amino)methyl)cyclohexane-1-carboxylate (sIAC), succinimidyl 6-((((4-iodoacetyl)amino)methyl)cyclohexane-1-carbonyl)amino) hexanoate (sIACX), p-nitrophenyl iodoacetate (NPIA), carbonyl-reactive and sulfhydryl-reactive cross-linkers such as 4-(4-N-maleimidophenyl)butyric acid hydrazide (MPBH), 4-(N-maleimidomethyl)cyclohexane-1-carboxyl-hydrazide-8 (M₂C₂H), 3-(2-pyridyldithio)propionyl hydrazide (PDPH), amine-reactive and photoreactive cross-linkers such as N-hydroxysuccinimidyl-4-azidosalicylic acid (NHs-AsA), N-hydroxysulfosuccinimidyl-4-azidosalicylic acid (sulfo-NHs-AsA), sulfosuccinimidyl-(4-azidosalicylamido)hexanoate (sulfo-NHs-LC-AsA), sulfosuccinimidyl-2-(p-azidosalicylamido)ethyl-1,3′-dithiopropionate (sAsD), N-hydroxysuccinimidyl-4-azidobenzoate (HsAB), N-hydroxysulfosuccinimidyl-4-azidobenzoate (sulfo-HsAB), N-succinimidyl-6-(4′-azido-2′-nitrophenylamino)hexanoate (sANPAH), sulfosuccinimidyl-6-(4′-azido-2′-nitrophenylamino)hexanoate (sulfo-sANPAH), N-5-azido-2-nitrobenzoyloxysuccinimide (ANB-NOs), sulfosuccinimidyl-2-(m-azido-o-nitrobenzamido)-ethyl-1,3′-dithiopropionate (sAND), N-succinimidyl-4(4-azidophenyl)1,3′-dithiopropionate (sADP), N-sulfosuccinimidyl(4-azidophenyl)-1,3′-dithiopropionate (sulfo-sADP), sulfosuccinimidyl 4-(p-azidophenyl)butyrate (sulfo-sAPB), sulfosuccinimidyl 2-(7-azido-4-methylcoumarin-3-acetamide)ethyl-1,3′-dithiopropionate (sAED), sulfosuccinimidyl 7-azido-4-methylcoumain-3-acetate (sulfo-sAMCA), ρ-nitrophenyl diazopyruvate (pNPDP), p-nitrophenyl-2-diazo-3,3,3-trifluoropropionate (PNP-DTP), sulfhydryl-reactive and photoreactive cross-linkers such as1-(ρ-Azidosalicylamido)-4-(iodoacetamido)butane (AsIB), N-[4-(p-azidosalicylamido)butyl]-3′-(2′-pyridyldithio)propionamide (APDP), benzophenone-4-iodoacetamide, benzophenone-4-maleimide carbonyl-reactive and photoreactive cross-linkers such as p-azidobenzoyl hydrazide (ABH), carboxylate-reactive and photoreactive cross-linkers such as 4-(p-azidosalicylamido)butylamine (AsBA), and arginine-reactive and photoreactive cross-linkers such as p-azidophenyl glyoxal (APG).

[0497] In some instances, the linker comprises a reactive functional group. In some cases, the reactive functional group comprises a nucleophilic group that is reactive to an electrophilic group present on a binding moiety. Exemplary electrophilic groups include carbonyl groups-such as aldehyde, ketone, carboxylic acid, ester, amide, enone, acyl halide or acid anhydride. In some embodiments, the reactive functional group is aldehyde. Exemplary nucleophilic groups include hydrazide, oxime, amino, hydrazine, thiosemicarbazone, hydrazine carboxylate, and arylhydrazide.

[0498] In some embodiments, the linker comprises a maleimide goup. In some instances, the maleimide group is also referred to as a maleimide spacer. In some instances, the maleimide group further encompasses a caproic acid, forming maleimidocaproyl (mc). In some cases, the linker comprises maleimidocaproyl (mc). In some cases, the linker is maleimidocaproyl (mc). In other instances, the maleimide group comprises a maleimidomethyl group, such as succinimidyl-4-(N-maleimidomethyl)cyclohexane-1-carboxylate (sMCC) or sulfosuccinimidyl-4-(N-maleimidomethyl)cyclohexane-1-carboxylate (sulfo-sMCC) described above.

[0499] In some embodiments, the maleimide group is a self-stabilizing maleimide. In some instances, the self-stabilizing maleimide utilizes diaminopropionic acid (DPR) to incorporate a basic amino group adjacent to the maleimide to provide intramolecular catalysis of tiosuccinimide ring hydrolysis, thereby eliminating maleimide from undergoing an elimination reaction through a retro-Michael reaction. In some instances, the self-stabilizing maleimide is a maleimide group described in Lyon, et al., “Self-hydrolyzing maleimides improve the stability and pharmacological properties of antibody-drug conjugates,” Nat. Biotechnol. 32(10):1059-1062 (2014). In some instances, the linker comprises a self-stabilizing maleimide. In some instances, the linker is a self-stabilizing maleimide.

[0500] In some embodiments, the linker comprises a peptide moiety. In some instances, the peptide moiety comprises at least 2, 3, 4, 5, 6, 7, 8, or more amino acid residues. In some instances, the peptide moiety is a cleavable peptide moiety (e.g., either enzymatically or chemically). In some instances, the peptide moiety is a non-cleavable peptide moiety. In some instances, the peptide moiety comprises Val-Cit (valine-citrulline), Gly-Gly-Phe-Gly (SEQ ID NO: 2111), Phe-Lys, Val-Lys, Gly-Phe-Lys, Phe-Phe-Lys, Ala-Lys, Val-Arg, Phe-Cit, Phe-Arg, Leu-Cit, Ile-Cit, Trp-Cit, Phe-Ala, Ala-Leu-Ala-Leu (SEQ ID NO: 2112), or Gly-Phe-Leu-Gly (SEQ ID NO: 2113). In some instances, the linker comprises a peptide moiety such as: Val-Cit (valine-citrulline), Gly-Gly-Phe-Gly (SEQ ID NO: 2111), Phe-Lys, Val-Lys, Gly-Phe-Lys, Phe-Phe-Lys, Ala-Lys, Val-Arg, Phe-Cit, Phe-Arg, Leu-Cit, Ile-Cit, Trp-Cit, Phe-Ala, Ala-Leu-Ala-Leu (SEQ ID NO: 2112), or Gly-Phe-Leu-Gly (SEQ ID NO: 2113). In some cases, the linker comprises Val-Cit. In some cases, the linker is Val-Cit.

[0501] In some embodiments, the linker comprises a benzoic acid group, or its derivatives thereof. In some instances, the benzoic acid group or its derivatives thereof comprise paraaminobenzoic acid (PABA). In some instances, the benzoic acid group or its derivatives thereof comprise gamma-aminobutyric acid (GABA).

[0502] In some embodiments, the linker comprises one or more of a maleimide group, a peptide moiety, and/or a benzoic acid group, in any combination. In some embodiments, the linker comprises a combination of a maleimide group, a peptide moiety, and/or a benzoic acid group. In some instances, the maleimide group is maleimidocaproyl (mc). In some instances, the peptide group is val-cit. In some instances, the benzoic acid group is PABA. In some instances, the linker comprises a mc-val-cit group. In some cases, the linker comprises a val-cit-PABA group. In additional cases, the linker comprises a mc-val-cit-PABA group.

[0503] In some embodiments, the linker is a self-immolative linker or a self-elimination linker. In some cases, the linker is a self-immolative linker. In other cases, the linker is a self-elimination linker (e.g., a cyclization self-elimination linker). In some instances, the linker comprises a linker described in U.S. Pat. No. 9,089,614 or PCT Publication No. WO2015038426.

[0504] In some embodiments, the linker is a dendritic type linker. In some instances, the dendritic type linker comprises a branching, multifunctional linker moiety. In some instances, the dendritic type linker is used to increase the molar ratio of polynucleotide B to the binding moiety A. In some instances, the dendritic type linker comprises PAMAM dendrimers.

[0505] In some embodiments, the linker is a traceless linker or a linker in which after cleavage does not leave behind a linker moiety (e.g., an atom or a linker group) to a binding moiety A, a polynucleotide B, a polymer C, or an endosomolytic moiety D. Exemplary traceless linkers include, but are not limited to, germanium linkers, silicium linkers, sulfur linkers, selenium linkers, nitrogen linkers, phosphorus linkers, boron linkers, chromium linkers, or phenylhydrazide linker. In some cases, the linker is a traceless aryl-triazene linker as described in Hejesen, et al., “A traceless aryl-triazene linker for DNA-directed chemistry,” Org Biomol Chem 11(15): 2493-2497 (2013). In some instances, the linker is a traceless linker described in Blaney, et al., “Traceless solid-phase organic synthesis,” Chem. Rev. 102: 2607-2024 (2002). In some instances, a linker is a traceless linker as described in U.S. Pat. No. 6,821,783.

[0506] In some instances, the linker comprises a functional group that exerts steric hinderance at the site of bonding between the linker and a conjugating moiety (e.g., A, B, C, or D described herein). In some instances, the steric hinderance is a steric hindrance around a disulfide bond. Exemplary linkers that exhibit steric hinderance comprises a heterobifuctional linker, such as a heterobifuctional linker described above. In some cases, a linker that exhibits steric hinderance comprises SMCC and SPDB.

[0507] In some instances, the linker is an acid cleavable linker. In some instances, the acid cleavable linker comprises a hydrazone linkage, which is susceptible to hydrolytic cleavage. In some cases, the acid cleavable linker comprises a thiomaleamic acid linker. In some cases, the acid cleavable linker is a thiomaleamic acid linker as described in Castaneda, et al, “Acid-cleavable thiomaleamic acid linker for homogeneous antibody-drug conjugation,” Chem. Commun. 49: 8187-8189 (2013).

[0508] In some instances, the linker is a linker described in U.S. Pat. Nos. 6,884,869; 7,498,298; 8,288,352; 8,609,105; or 8,697,688; U.S. Patent Publication Nos. 2014/0127239; 2013/028919; 2014/286970; 2013/0309256; 2015/037360; or 2014/0294851; or PCT Publication Nos. WO2015057699; WO2014080251; WO2014197854; WO2014145090; or WO2014177042.

[0509] In some embodiments, X, Y, and L are independently a bond or a linker. In some instances, X, Y, and L are independently a bond. In some cases, X, Y, and L are independently a linker.

[0510] In some instances, X is a bond or a linker. In some instances, X is a bond. In some instances, X is a linker. In some instances, the linker is a C₁-C₆ alkyl group. In some cases, X is a C₁-C₆ alkyl group, such as for example, a C₅, C₄, C₃, C₂, or C₁ alkyl group. In some cases, the C₁-C₆ alkyl group is an unsubstituted C₁-C₆ alkyl group. As used in the context of a linker, and in particular in the context of X, alkyl means a saturated straight or branched hydrocarbon radical containing up to six carbon atoms. In some instances, X is a non-polymeric linker. In some instances, X includes a homobifuctional linker or a heterobifuctional linker described supra. In some cases, X includes a heterobifunctional linker. In some cases, X includes sMCC. In other instances, X includes a heterobifuctional linker optionally conjugated to a C₁-C₆ alkyl group. In other instances, X includes sMCC optionally conjugated to a C₁-C₆ alkyl group. In additional instances, X does not include a homobifuctional linker or a heterobifunctional linker described supra.

[0511] In some instances, Y is a bond or a linker. In some instances, Y is a bond. In other cases, Y is a linker. In some embodiments, Y is a C₁-C₆ alkyl group. In some instances, Y is a homobifuctional linker or a heterobifunctional linker described supra. In some instances, Y is a homobifuctional linker described supra. In some instances, Y is a heterobifunctional linker described supra. In some instances, Y comprises a maleimide group, such as maleimidocaproyl (mc) or a self-stabilizing maleimide group described above. In some instances, Y comprises a peptide moiety, such as Val-Cit. In some instances, Y comprises a benzoic acid group, such as PABA. In additional instances, Y comprises a combination of a maleimide group, a peptide moiety, and/or a benzoic acid group. In additional instances, Y comprises a me group. In additional instances, Y comprises a mc-val-cit group. In additional instances, Y comprises a val-cit-PABA group. In additional instances, Y comprises a mc-val-cit-PABA group.

[0512] In some instances, L is a bond or a linker. In some cases, L is a bond. In other cases, L is a linker. In some embodiments, L is a C₁-C₆ alkyl group. In some instances, L is a homobifuctional linker or a heterobifunctional linker described supra. In some instances, L is a homobifuctional linker described supra. In some instances, L is a heterobifunctional linker described supra. In some instances, L comprises a maleimide group, such as maleimidocaproyl (mc) or a self-stabilizing maleimide group described above. In some instances, L comprises a peptide moiety, such as Val-Cit. In some instances, L comprises a benzoic acid group, such as PABA. In additional instances, L comprises a combination of a maleimide group, a peptide moiety, and/or a benzoic acid group. In additional instances, L comprises a me group. In additional instances, L comprises a mc-val-cit group. In additional instances, L comprises a val-cit-PABA group. In additional instances, L comprises a mc-val-cit-PABA group.

### Methods of Use

[0513] In some embodiments, a composition or a pharmaceutical formulation described herein comprising a binding moiety conjugated to a polynucleic acid molecule and a polymer is used for the treatment of a disease or disorder. In some instances, the disease or disorder is a cancer. In some embodiments, a composition or a pharmaceutical formulation described herein is used as an immunotherapy for the treatment of a disease or disorder. In some instances, the immunotherapy is an immuno-oncology therapy.

### Cancer

[0514] In some embodiments, a composition or a pharmaceutical formulation described herein is used for the treatment of cancer. In some instances, the cancer is a solid tumor. In some instances, the cancer is a hematologic malignancy. In some instances, the cancer is a relapsed or refractory cancer, or a metastatic cancer. In some instances, the solid tumor is a relapsed or refractory solid tumor, or a metastatic solid tumor. In some cases, the hematologic malignancy is a relapsed or refractory hematologic malignancy, or a metastatic hematologic malignancy.

[0515] In some embodiments, the cancer is a solid tumor. Exemplary solid tumor includes, but is not limited to, anal cancer, appendix cancer, bile duct cancer (i.e., cholangiocarcinoma), bladder cancer, brain tumor, breast cancer, cervical cancer, colon cancer, cancer of Unknown Primary (CUP), esophageal cancer, eye cancer, fallopian tube cancer, gastroenterological cancer, kidney cancer, liver cancer, lung cancer, medulloblastoma, melanoma, oral cancer, ovarian cancer, pancreatic cancer, parathyroid disease, penile cancer, pituitary tumor, prostate cancer, rectal cancer, skin cancer, stomach cancer, testicular cancer, throat cancer, thyroid cancer, uterine cancer, vaginal cancer, or vulvar cancer.

[0516] In some instances, a composition or a pharmaceutical formulation described herein comprising a binding moiety conjugated to a polynucleic acid molecule and a polymer is used for the treatment of a solid tumor. In some instances, a composition or a pharmaceutical formulation described herein comprising a binding moiety conjugated to a polynucleic acid molecule and a polymer is used for the treatment of anal cancer, appendix cancer, bile duct cancer (i.e., cholangiocarcinoma), bladder cancer, brain tumor, breast cancer, cervical cancer, colon cancer, cancer of Unknown Primary (CUP), esophageal cancer, eye cancer, fallopian tube cancer, gastroenterological cancer, kidney cancer, liver cancer, lung cancer, medulloblastoma, melanoma, oral cancer, ovarian cancer, pancreatic cancer, parathyroid disease, penile cancer, pituitary tumor, prostate cancer, rectal cancer, skin cancer, stomach cancer, testicular cancer, throat cancer, thyroid cancer, uterine cancer, vaginal cancer, or vulvar cancer. In some instances, the solid tumor is a relapsed or refractory solid tumor, or a metastatic solid tumor.

[0517] In some instances, the cancer is a hematologic malignancy. In some instances, the hematologic malignancy is a leukemia, a lymphoma, a myeloma, a non-Hodgkin's lymphoma, or a Hodgkin's lymphoma. In some instances, the hematologic malignancy comprises chronic lymphocytic leukemia (CLL), small lymphocytic lymphoma (SLL), high risk CLL, a non-CLL/SLL lymphoma, prolymphocytic leukemia (PLL), follicular lymphoma (FL), diffuse large B-cell lymphoma (DLBCL), mantle cell lymphoma (MCL), Waldenstrom's macroglobulinemia, multiple myeloma, extranodal marginal zone B cell lymphoma, nodal marginal zone B cell lymphoma, Burkitt's lymphoma, non-Burkitt high grade B cell lymphoma, primary mediastinal B-cell lymphoma (PMBL), immunoblastic large cell lymphoma, precursor B-lymphoblastic lymphoma, B cell prolymphocytic leukemia, lymphoplasmacytic lymphoma, splenic marginal zone lymphoma, plasma cell myeloma, plasmacytoma, mediastinal (thymic) large B cell lymphoma, intravascular large B cell lymphoma, primary effusion lymphoma, or lymphomatoid granulomatosis.

[0518] In some instances, a composition or a pharmaceutical formulation described herein comprising a binding moiety conjugated to a polynucleic acid molecule and a polymer is used for the treatment of a hematologic malignancy. In some instances, a composition or a pharmaceutical formulation described herein comprising a binding moiety conjugated to a polynucleic acid molecule and a polymer is used for the treatment of a leukemia, a lymphoma, a myeloma, a non-Hodgkin's lymphoma, or a Hodgkin's lymphoma. In some instances, the hematologic malignancy comprises chronic lymphocytic leukemia (CLL), small lymphocytic lymphoma (SLL), high risk CLL, a non-CLL/SLL lymphoma, prolymphocytic leukemia (PLL), follicular lymphoma (FL), diffuse large B-cell lymphoma (DLBCL), mantle cell lymphoma (MCL), Waldenström's macroglobulinemia, multiple myeloma, extranodal marginal zone B cell lymphoma, nodal marginal zone B cell lymphoma, Burkitt's lymphoma, non-Burkitt high grade B cell lymphoma, primary mediastinal B-cell lymphoma (PMBL), immunoblastic large cell lymphoma, precursor B-lymphoblastic lymphoma, B cell prolymphocytic leukemia, lymphoplasmacytic lymphoma, splenic marginal zone lymphoma, plasma cell myeloma, plasmacytoma, mediastinal (thymic) large B cell lymphoma, intravascular large B cell lymphoma, primary effusion lymphoma, or lymphomatoid granulomatosis. In some cases, the hematologic malignancy is a relapsed or refractory hematologic malignancy, or a metastatic hematologic malignancy.

[0519] In some instances, the cancer is a KRAS-associated, EGFR-associated, AR-associated cancer, HPRT1-associated cancer, or β-catenin associated cancer. In some instances, a composition or a pharmaceutical formulation described herein comprising a binding moiety conjugated to a polynucleic acid molecule and a polymer is used for the treatment of a KRAS-associated, EGFR-associated, AR-associated cancer, HPRT1-associated cancer, or β-catenin associated cancer. In some instances, a composition or a pharmaceutical formulation described herein comprising a binding moiety conjugated to a polynucleic acid molecule and a polymer is used for the treatment of a KRAS-associated cancer. In some instances, a composition or a pharmaceutical formulation described herein comprising a binding moiety conjugated to a polynucleic acid molecule and a polymer is used for the treatment of an EGFR-associated cancer. In some instances, a composition or a pharmaceutical formulation described herein comprising a binding moiety conjugated to a polynucleic acid molecule and a polymer is used for the treatment of an AR-associated cancer. In some instances, a composition or a pharmaceutical formulation described herein comprising a binding moiety conjugated to a polynucleic acid molecule and a polymer is used for the treatment of an HPRT1-associated cancer. In some instances, a composition or a pharmaceutical formulation described herein comprising a binding moiety conjugated to a polynucleic acid molecule and a polymer is used for the treatment of a β-catenin associated cancer. In some instances, the cancer is a solid tumor. In some instances, the cancer is a hematologic malignancy. In some instances, the solid tumor is a relapsed or refractory solid tumor, or a metastatic solid tumor. In some cases, the hematologic malignancy is a relapsed or refractory hematologic malignancy, or a metastatic hematologic malignancy. In some instances, the cancer comprises bladder cancer, breast cancer, colorectal cancer, endometrial cancer, esophageal cancer, glioblastoma multiforme, head and neck cancer, kidney cancer, lung cancer, ovarian cancer, pancreatic cancer, prostate cancer, thyroid cancer, acute myeloid leukemia, CLL, DLBCL, or multiple myeloma. In some instances, the β-catenin associated cancer further comprises PIK3C-associated cancer and/or MYC-associated cancer.

### Immunotherapy

[0520] In some embodiments, a composition or a pharmaceutical formulation described herein is used as an immunotherapy for the treatment of a disease or disorder. In some instances, the immunotherapy is an immuno-oncology therapy. In some instances, immuno-oncology therapy is categorized into active, passive, or combinatory (active and passive) methods. In active immuno-oncology therapy method, for example, tumor-associated antigens (TAAs) are presented to the immune system to trigger an attack on cancer cells presenting these TAAs. In some instances, the active immune-oncology therapy method includes tumor-targeting and/or immune-targeting agents (e.g., checkpoint inhibitor agents such as monoclonal antibodies), and/or vaccines, such as in situ vaccination and/or cell-based or non-cell based (e.g., dendritic cell-based, tumor cell-based, antigen, anti-idiotype, DNA, or vector-based) vaccines. In some instances, the cell-based vaccines are vaccines which are generated using activated immune cells obtained from a patient's own immune system which are then activated by the patient's own cancer. In some instances, the active immune-oncology therapy is further subdivided into non-specific active immunotherapy and specific active immunotherapy. In some instances, non-specific active immunotherapy utilizes cytokines and/or other cell signaling components to induce a general immune system response. In some cases, specific active immunotherapy utilizes specific TAAs to elicite an immune response.

[0521] In some embodiments, a composition or a pharmaceutical formulation described herein is used as an active immuno-oncology therapy method for the treatment of a disease or disorder (e.g., cancer). In some embodiments, the composition or a pharmaceutical formulation described herein comprises a tumor-targeting agent. In some instances, the tumor-targeting agent is encompassed by a binding moiety A. In other instances, the tumor-targeting agent is an additional agent used in combination with a molecule of Formula (I). In some instances, the tumor-targeting agent is a tumor-directed polypeptide (e.g., a tumor-directed antibody). In some instances, the tumor-targeting agent is a tumor-directed antibody, which exerts its antitumor activity through mechanisms such as direct killing (e.g., signaling-induced apoptosis), complement-dependent cytotoxicity (CDC), and/or antibody-dependent cell-mediated cytotoxicity (ADCC). In additional instances, the tumor-targeting agent elicits an adaptive immune response, with the induction of antitumor T cells.

[0522] In some embodiments, the binding moiety A is a tumor-directed polypeptide (e.g., a tumor-directed antibody). In some instances, the binding moiety A is a tumor-directed antibody, which exerts its antitumor activity through mechanisms such as direct killing (e.g., signaling-induced apoptosis), complement-dependent cytotoxicity (CDC), and/or antibody-dependent cell-mediated cytotoxicity (ADCC). In additional instances, the binding moiety A elicits an adaptive immune response, with the induction of antitumor T cells.

[0523] In some embodiments, the composition or a pharmaceutical formulation described herein comprises an immune-targeting agent. In some instances, the immune-targeting agent is encompassed by a binding moiety A. In other instances, the immune-targeting agent is an additional agent used in combination with a molecule of Formula (I). In some instances, the immune-targeting agent comprises cytokines, checkpoint inhibitors, or a combination thereof.

[0524] In some embodiments, the immune-targeting agent is a checkpoint inhibitor. In some cases, an immune checkpoint molecule is a molecule presented on the cell surface of CD4 and/or CD8 T cells. Exemplary immune checkpoint molecules include, but are not limited to, Programmed Death-Ligand 1 (PD-L1, also known as B7-H1, CD274), Programmed Death 1 (PD-1), CTLA-4, B7H1, B7H4, OX—40, CD137, CD40, 2B4, IDO1, IDO2, VISTA, CD27, CD28, PD-L2 (B7-DC, CD273), LAG3, CD80, CD86, PDL2, B7H3, HVEM, BTLA, KIR, GAL9, TIM3, A2aR, MARCO (macrophage receptor with collageneous structure), PS (phosphatidylserine), ICOS (inducible T cell costimulator), HAVCR2, CD276, VTCN1, CD70, and CD160.

[0525] In some instances, an immune checkpoint inhibitor refers to any molecule that modulates or inhibits the activity of an immune checkpoint molecule. In some instances, immune checkpoint inhibitors include antibodies, antibody-derivatives (e.g., Fab fragments, scFvs, minobodies, diabodies), antisense oligonucleotides, siRNA, aptamers, or peptides. In some embodiments, an immune checkpoint inhibitor is an inhibitor of Programmed Death-Ligand 1 (PD-L1, also known as B7-H1, CD274), Programmed Death 1 (PD-1), CTLA-4, PD-L2 (B7-DC, CD273), LAG3, TIM3, 2B4, A2aR, B7H1, B7H3, B7H4, BTLA, CD2, CD27, CD28, CD30, CD40, CD70, CD80, CD86, CD137, CD160, CD226, CD276, DR3, GAL9, GITR, HAVCR2, HVEM, IDO1, IDO2, ICOS (inducible T cell costimulator), KIR, LAIR1, LIGHT, MARCO (macrophage receptor with collageneous structure), PS (phosphatidylserine), OX—40, SLAM, TIGHT, VISTA, VTCN1, or any combinations thereof.

[0526] In some embodiments, exemplary checkpoint inhibitors include:
[0527] PD-L1 inhibitors such as Genentech's MPDL3280A (RG7446), Anti-mouse PD-L1 antibody Clone 10F.9G2 (Cat #BE0101) from BioXcell, anti-PD-L1 monoclonal antibody MDX-1105 (BMS-936559) and BMS-935559 from Bristol-Meyer's Squibb, MSB0010718C, mouse anti-PD-L1 Clone 29E.2A3, and AstraZeneca's MEDI4736;
[0528] PD-L2 inhibitors such as GlaxoSmithKline's AMP-224 (Amplimmune), and rHIgM12B7;
[0529] PD-1 inhibitors such as anti-mouse PD-1 antibody Clone J43 (Cat #BE0033-2) from BioXcell, anti-mouse PD-1 antibody Clone RMP1-14 (Cat #BE0146) from BioXcell, mouse anti-PD-1 antibody Clone EH12, Merck's MK-3475 anti-mouse PD-1 antibody (Keytruda, pembrolizumab, lambrolizumab), AnaptysBio's anti-PD-1 antibody known as ANB011, antibody MDX-1 106 (ONO-4538), Bristol-Myers Squibb's human IgG4 monoclonal antibody nivolumab (Opdivo®, BMS-936558, MDX1106), AstraZeneca's AMP-514 and AMP-224, and Pidilizumab (CT-011) from CureTech Ltd;
[0530] CTLA-4 inhibitors such as Bristol Meyers Squibb's anti-CTLA-4 antibody ipilimumab (also known as Yervoy®, MDX-010, BMS-734016 and MDX-101), anti-CTLA4 Antibody, clone 9H10 from Millipore, Pfizer's tremelimumab (CP-675,206, ticilimumab), and anti-CTLA4 antibody clone BNI3 from Abcam;
[0531] LAG3 inhibitors such as anti-Lag-3 antibody clone eBioC9B7W (C9B7W) from eBioscience, anti-Lag3 antibody LS-B2237 from LifeSpan Biosciences, IMP321 (ImmuFact) from Immutep, anti-Lag3 antibody BMS-986016, and the LAG-3 chimeric antibody A9H12;
[0532] B7-H3 inhibitors such as MGA271;
[0533] KIR inhibitors such as Lirilumab (IPH2101);
[0534] CD137 (41BB) inhibitors such as urelumab (BMS-663513, Bristol-Myers Squibb), PF-05082566 (anti-4-1BB, PF-2566, Pfizer), or XmAb-5592 (Xencor);
[0535] PS inhibitors such as Bavituximab;
[0536] and inhibitors such as an antibody or fragments (e.g., a monoclonal antibody, a human, humanized, or chimeric antibody) thereof, RNAi molecules, or small molecules to TIM3, CD52, CD30, CD20, CD33, CD27, OX40 (CD134), GITR, ICOS, BTLA (CD272), CD160, 2B4, LAIR1, TIGHT, LIGHT, DR3, CD226, CD2, or SLAM.

[0537] In some embodiments, a binding moiety A comprising an immune checkpoint inhibitor is used for the treatment of a disease or disorder (e.g., cancer). In some instances, the binding moiety A is a bispecific antibody or a binding fragment thereof that comprises an immune checkpoint inhibitor. In some cases, a binding moiety A comprising an inhibitor of Programmed Death-Ligand 1 (PD-L1, also known as B7-H1, CD274), Programmed Death 1 (PD-1), CTLA-4, PD-L2 (B7-DC, CD273), LAG3, TIM3, 2B4, A2aR, B7H1, B7H3, B7H4, BTLA, CD2, CD27, CD28, CD30, CD40, CD70, CD80, CD86, CD137, CD160, CD226, CD276, DR3, GAL9, GITR, HAVCR2, HVEM, IDO1, IDO2, ICOS (inducible T cell costimulator), KIR, LAIR1, LIGHT, MARCO (macrophage receptor with collageneous structure), PS (phosphatidylserine), OX-40, SLAM, TIGHT, VISTA, VTCN1, or any combinations thereof, is used for the treatment of a disease or disorder (e.g., cancer).

[0538] In some embodiments, a molecule of Formula (I) in combination with an immune checkpoint inhibitor is used for the treatment of a disease or disorder (e.g., cancer). In some instances, the immune checkpoint inhibitor comprises an inhibitor of Programmed Death-Ligand 1 (PD-L1, also known as B7-H1, CD274), Programmed Death 1 (PD-1), CTLA-4, PD-L2 (B7-DC, CD273), LAG3, TIM3, 2B4, A2aR, B7H1, B7H3, B7H4, BTLA, CD2, CD27, CD28, CD30, CD40, CD70, CD80, CD86, CD137, CD160, CD226, CD276, DR3, GAL9, GITR, HAVCR2, HVEM, IDO1, IDO2, ICOS (inducible T cell costimulator), KIR, LAIR1, LIGHT, MARCO (macrophage receptor with collageneous structure), PS (phosphatidylserine), OX—40, SLAM, TIGHT, VISTA, VTCN1, or any combinations thereof. In some cases, a molecule of Formula (I) is used in combination with ipilimumab, tremelimumab, nivolumab, pemrolizumab, pidilizumab, MPDL3280A, MEDI4736, MSB0010718C, MK-3475, or BMS-936559, for the treatment of a disease or disorder (e.g., cancer).

[0539] In some embodiments, the immune-targeting agent is a cytokine. In some cases, cytokine is further subgrouped into chemokine, interferon, interleukin, and tumor necrosis factor. In some embodiments, chemokine plays a role as a chemoattractant to guide the migration of cells, and is classified into four subfamilies: CXC, CC, CX3C, and XC. Exemplary chemokines include chemokines from the CC subfamily: CCL1, CCL2 (MCP-1), CCL3, CCL4. CCL5 (RANTES), CCL6, CCL7, CCL8, CCL9 (or CCL10), CCL11, CCL12, CCL13, CCL14, CCL15, CCL16, CCL17, CCL18, CCL19, CCL20, CCL2.1, CCL22, CCL23, CCL24, CCL25, CCL26, CCL27, and CCL28; the CXC subfamily: CXCL1, CXCL2, CXCL3, CXCL4, CXCL5, CXCL6, CXCL7, CXCL8, CXCL9, CXCL10, CXCL11, CXCL12, CXCL13, CXCL14, CXCL15, CXCL16, and CXCL17; the XC subfamily: XCL1 and XCL2; and the CX3C subfamily CX3CL1.

[0540] Interferon (IFNs) comprises interferon type I (e.g. IFN-α, IFN-β, IFN—ε, IFN-κ, and IFN-ω), interferon type II (e.g. IFN-γ), and interferon type III. In some embodiments, IFN-ca, is further classified into about 13 subtypes which include IFNA1, IFNA2, IFNA4, IFNA5, IFNA6, IFNA7, IFNA8, IFNA10, IFNA13, IFNA14, IFNA16, IFNA17, and IFNA21.

[0541] Interleukin is expressed by leukocyte or white blood cell and promote the development and differentiation of T and B lymphocytes and hematopoietic cells. Exemplary interleukins include IL-1, IL-2, IL-3, TL-4, IL-5, IL-6, TL-7, IL-8 (CXCL8), IL-9, IL-10, IL-11, IL-12, IL-13, IL-14, IL-15, IL-16, IL-17, IL-18, IL-19, IL-20, IL-21, IL-22. IL-23, IL-24, IL-25, IL-26, IL-27, IL-28, IL-29, IL-30, IL-31, IL-32, IL-33, IL-35, and IL-36.

[0542] Tumor necrosis factors (TNFs) are a group of cytokines that modulate apoptosis. In some instances, there are about 19 members within the TNF family, including, not limited to, TNFα, lymnphotoxin-alpha (LT-alpha), lymnphotoxin-beta (LT-beta), T cell antigen gp39 (CD40L), CD27L. CD30L, FASL, 4-1BBL, OX40L, and TNF-related apoptosis inducing ligand (TRAIL).

[0543] In some embodiments, a molecule of Formula (I) in combination with a cytokine is used for the treatment of a disease or disorder (e.g., cancer). In some cases, a molecule of Formula (I) in combination with a chemokine is used for the treatment of a disease or disorder (e.g., cancer). In some cases, a molecule of Formula (I) in combination with an interferon is used for the treatment of a disease or disorder (e.g., cancer). In some cases, a molecule of Formula (I) in combination with an interleukin is used for the treatment of a disease or disorder (e.g., cancer). In some cases, a molecule of Formula (I) in combination with a tumor necrosis factor is used for the treatment of a disease or disorder (e.g., cancer). In some instances, a molecule of Formula (I) in combination with IL-10, IL-2, IL-7, IL-8, IL-15, MCP-1 (CCL2), MIP-1α, RANTES, MCP-3, MIP5, CCL19, CCL21, CXCL2, CXCL9, CXCL10, or CXCL11 is used for the treatment of a disease or disorder (e.g., cancer).

[0544] In some embodiments, the composition or a pharmaceutical formulation described herein comprises a vaccine. In some instances, the vaccine is an in situ vaccination. In some instances, the vaccine is a cell-based vaccine. In some instances, the vaccine is a non-cell based vaccine. In some instances, a molecule of Formula (I) in combination with dendritic cell-based vaccine is used for the treatment of a disease or disorder (e.g., cancer). In some instances, a molecule of Formula (I) in combination with tumor cell-based vaccine is used for the treatment of a disease or disorder (e.g., cancer). In some instances, a molecule of Formula (I) in combination with antigen vaccine is used for the treatment of a disease or disorder (e.g., cancer). In some instances, a molecule of Formula (I) in combination with anti-idiotype vaccine is used for the treatment of a disease or disorder (e.g., cancer). In some instances, a molecule of Formula (I) in combination with DNA vaccine is used for the treatment of a disease or disorder (e.g., cancer). In some instances, a molecule of Formula (I) in combination with vector-based vaccine is used for the treatment of a disease or disorder (e.g., cancer).

[0545] In some embodiments, a composition or a pharmaceutical formulation described herein is used as a passive immuno-oncology therapy method for the treatment of a disease or disorder (e.g., cancer). The passive method, in some instances, utilizes adoptive immune system components such as T cells, natural killer (NK) T cells, and/or chimeric antigen receptor (CAR) T cells generated exogenously to attack cancer cells.

[0546] In some embodiments, a molecule of Formula (I) in combination with a T-cell based therapeutic agent is used for the treatment of a disease or disorder (e.g., cancer). In some cases, the T-cell based therapeutic agent is an activated T-cell agent that recognizes one or more of a CD cell surface marker described above. In some instances, the T-cell based therapeutic agent comprises an activated T-cell agent that recognizes one or more of CD2, CD3, CD4, CD5, CD8, CD27, CD28, CD80, CD134, CD137, CD152, CD154, CD160, CD200R, CD223, CD226, CD244, CD258, CD267, CD272, CD274, CD278, CD279, or CD357. In some instances, a molecule of Formula (I) in combination with an activated T-cell agent recognizing one or more of CD2, CD3, CD4, CD5, CD8, CD27, CD28, CD80, CD134, CD137, CD152, CD154, CD160, CD200R, CD223, CD226, CD244, CD258, CD267, CD272, CD274, CD278, CD279, or CD357 is used for the treatment of a disease or disorder (e.g., cancer).

[0547] In some embodiments, a molecule of Formula (I) in combination with natural killer (NK) T cell-based therapeutic agent is used for the treatment of a disease or disorder (e.g., cancer). In some instances, the NK-based therapeutic agent is an activated NK agent that recognizes one or more of a CD cell surface marker described above. In some cases, the NK-based therapeutic agent is an activated NK agent that recognizes one or more of CD2, CD11a, CD11b, CD16, CD56, CD58, CD62L, CD85j, CD158a/b, CD158c, CD158e/f/k, CD158 h/j, CD159a, CD162, CD226, CD314, CD335, CD337, CD244, or CD319. In some instances, a molecule of Formula (I) in combination with an activated NK agent recognizing one or more of CD2, CD11a, CD11b, CD16, CD56, CD58, CD62L, CD85j, CD158a/b, CD158c, CD158e/f/k, CD158 h/j, CD159a, CD162, CD226, CD314, CD335, CD337, CD244, or CD319 is used for the treatment of a disease or disorder (e.g., cancer).

[0548] In some embodiments, a molecule of Formula (I) in combination with CAR-T cell-based therapeutic agent is used for the treatment of a disease or disorder (e.g., cancer).

[0549] In some embodiments, a molecule of Formula (I) in combination with an additional agent that destabilizes the endosomal membrane (or disrupts the endosomal-lysosomal membrane trafficking) is used for the treatment of a disease or disorder (e.g., cancer). In some instances, the additional agent comprises an antimitotic agent. Exemplary antimitotic agents include, but are not limited to, taxanes such as paclitaxel and docetaxel; vinca alkaloids such as vinblastine, vincristine, vindesine, and vinorelbine; cabazitaxel; colchicine; eribulin; estramustine; etoposide; ixabepilone; podophyllotoxin; teniposide; or griseofulvin. In some instances, the additional agent comprises paclitaxel, docetaxel, vinblastine, vincristine, vindesine, vinorelbine, cabazitaxel, colchicine, eribulin, estramustine, etoposide, ixabepilone, podophyllotoxin, teniposide, or griseofulvin. In some instances, the additional agent comprises taxol. In some instances, the additional agent comprises paclitaxel. In some instances, the additional agent comprises etoposide. In other instances, the additional agent comprises vitamin K3.

[0550] In some embodiments, a composition or a pharmaceutical formulation described herein is used as a combinatory method (including for both active and passive methods) in the treatment of a disease or disorder (e.g., cancer).

### Pharmaceutical Formulation

[0551] In some embodiments, the pharmaceutical formulations described herein are administered to a subject by multiple administration routes, including but not limited to, parenteral (e.g., intravenous, subcutaneous, intramuscular), oral, intranasal, buccal, rectal, or transdermal administration routes. In some instances, the pharmaceutical composition describe herein is formulated for parenteral (e.g., intravenous, subcutaneous, intramuscular) administration. In other instances, the pharmaceutical composition describe herein is formulated for oral administration. In still other instances, the pharmaceutical composition describe herein is formulated for intranasal administration.

[0552] In some embodiments, the pharmaceutical formulations include, but are not limited to, aqueous liquid dispersions, self-emulsifying dispersions, solid solutions, liposomal dispersions, aerosols, solid dosage forms, powders, immediate-release formulations, controlled-release formulations, fast melt formulations, tablets, capsules, pills, delayed release formulations, extended release formulations, pulsatile release formulations, multiparticulate formulations (e.g., nanoparticle formulations), and mixed immediate and controlled release formulations.

[0553] In some instances, the pharmaceutical formulation includes multiparticulate formulations. In some instances, the pharmaceutical formulation includes nanoparticle formulations. In some instances, nanoparticles comprise cMAP, cyclodextrin, or lipids. In some cases, nanoparticles comprise solid lipid nanoparticles, polymeric nanoparticles, self-emulsifying nanoparticles, liposomes, microemulsions, or micellar solutions. Additional exemplary nanoparticles include, but are not limited to, paramagnetic nanoparticles, superparamagnetic nanoparticles, metal nanoparticles, fullerene-like materials, inorganic nanotubes, dendrimers (such as with covalently attached metal chelates), nanofibers, nanohorns, nano-onions, nanorods, nanoropes and quantum dots. In some instances, a nanoparticle is a metal nanoparticle, e.g., a nanoparticle of scandium, titanium, vanadium, chromium, manganese, iron, cobalt, nickel, copper, zinc, yttrium, zirconium, niobium, molybdenum, ruthenium, rhodium, palladium, silver, cadmium, hafnium, tantalum, tungsten, rhenium, osmium, iridium, platinum, gold, gadolinium, aluminum, gallium, indium, tin, thallium, lead, bismuth, magnesium, calcium, strontium, barium, lithium, sodium, potassium, boron, silicon, phosphorus, germanium, arsenic, antimony, and combinations, alloys or oxides thereof.

[0554] In some instances, a nanoparticle includes a core or a core and a shell, as in a core-shell nanoparticle.

[0555] In some instances, a nanoparticle is further coated with molecules for attachment of functional elements (e.g., with one or more of a polynucleic acid molecule or binding moiety described herein). In some instances, a coating comprises chondroitin sulfate, dextran sulfate, carboxymethyl dextran, alginic acid, pectin, carragheenan, fucoidan, agaropectin, porphyran, karaya gum, gellan gum, xanthan gum, hyaluronic acids, glucosamine, galactosamine, chitin (or chitosan), polyglutamic acid, polyaspartic acid, lysozyme, cytochrome C, ribonuclease, trypsinogen, chymotrypsinogen, α-chymotrypsin, polylysine, polyarginine, histone, protamine, ovalbumin, dextrin, or cyclodextrin. In some instances, a nanoparticle comprises a graphene-coated nanoparticle.

[0556] In some cases, a nanoparticle has at least one dimension of less than about 500 nm, 400 nm, 300 nm, 200 nm, or 100 nm.

[0557] In some instances, the nanoparticle formulation comprises paramagnetic nanoparticles, superparamagnetic nanoparticles, metal nanoparticles, fullerene-like materials, inorganic nanotubes, dendrimers (such as with covalently attached metal chelates), nanofibers, nanohorns, nano-onions, nanorods, nanoropes or quantum dots. In some instances, a polynucleic acid molecule or a binding moiety described herein is conjugated either directly or indirectly to the nanoparticle. In some instances, at least 1, 5, 10, 15, 20, 30, 40, 50, 60, 70, 80, 90, 100, or more polynucleic acid molecules or binding moieties described herein are conjugated either directly or indirectly to a nanoparticle.

[0558] In some embodiments, the pharmaceutical formulations include a carrier or carrier materials selected on the basis of compatibility with the composition disclosed herein, and the release profile properties of the desired dosage form. Exemplary carrier materials include, e.g., binders, suspending agents, disintegration agents, filling agents, surfactants, solubilizers, stabilizers, lubricants, wetting agents, diluents, and the like. Pharmaceutically compatible carrier materials include, but are not limited to, acacia, gelatin, colloidal silicon dioxide, calcium glycerophosphate, calcium lactate, maltodextrin, glycerine, magnesium silicate, polyvinylpyrrollidone (PVP), cholesterol, cholesterol esters, sodium caseinate, soy lecithin, taurocholic acid, phosphotidylcholine, sodium chloride, tricalcium phosphate, dipotassium phosphate, cellulose and cellulose conjugates, sugars sodium stearoyl lactylate, carrageenan, monoglyceride, diglyceride, pregelatinized starch, and the like. See, e.g., Remington: The Science and Practice of Pharmacy, Nineteenth Ed (Easton, Pa.: Mack Publishing Company, 1995); Hoover, John E., Remington's Pharmaceutical Sciences, Mack Publishing Co., Easton, Pennsylvania 1975; Liberman, H. A. and Lachman, L., Eds., Pharmaceutical Dosage Forms, Marcel Decker, New York, N.Y., 1980; and Pharmaceutical Dosage Forms and Drug Delivery Systems, Seventh Ed. (Lippincott Williams & Wilkins 1999).

[0559] In some instances, the pharmaceutical formulations further include pH-adjusting agents or buffering agents which include acids such as acetic, boric, citric, lactic, phosphoric and hydrochloric acids; bases such as sodium hydroxide, sodium phosphate, sodium borate, sodium citrate, sodium acetate, sodium lactate and tris-hydroxymethylaminomethane; and buffers such as citrate/dextrose, sodium bicarbonate and ammonium chloride. Such acids, bases and buffers are included in an amount required to maintain pH of the composition in an acceptable range.

[0560] In some instances, the pharmaceutical formulation includes one or more salts in an amount required to bring osmolality of the composition into an acceptable range. Such salts include those having sodium, potassium or ammonium cations and chloride, citrate, ascorbate, borate, phosphate, bicarbonate, sulfate, thiosulfate or bisulfite anions; suitable salts include sodium chloride, potassium chloride, sodium thiosulfate, sodium bisulfite and ammonium sulfate.

[0561] In some instances, the pharmaceutical formulations further include diluent which are used to stabilize compounds because they can provide a more stable environment. Salts dissolved in buffered solutions (which also can provide pH control or maintenance) are utilized as diluents in the art, including, but not limited to a phosphate buffered saline solution. In certain instances, diluents increase bulk of the composition to facilitate compression or create sufficient bulk for homogenous blend for capsule filling. Such compounds can include e.g., lactose, starch, mannitol, sorbitol, dextrose, microcrystalline cellulose such as Avicel®; dibasic calcium phosphate, dicalcium phosphate dihydrate; tricalcium phosphate, calcium phosphate; anhydrous lactose, spray-dried lactose; pregelatinized starch, compressible sugar, such as Di-Pac® (Amstar); mannitol, hydroxypropylmethylcellulose, hydroxypropylmethylcellulose acetate stearate, sucrose-based diluents, confectioner's sugar; monobasic calcium sulfate monohydrate, calcium sulfate dihydrate; calcium lactate trihydrate, dextrates; hydrolyzed cereal solids, amylose; powdered cellulose, calcium carbonate; glycine, kaolin; mannitol, sodium chloride; inositol, bentonite, and the like.

[0562] In some cases, the pharmaceutical formulations include disintegration agents or disintegrants to facilitate the breakup or disintegration of a substance. The term “disintegrate” include both the dissolution and dispersion of the dosage form when contacted with gastrointestinal fluid. Examples of disintegration agents include a starch, e.g., a natural starch such as corn starch or potato starch, a pregelatinized starch such as National 1551 or Amijel®, or sodium starch glycolate such as Promogel® or Explotab®, a cellulose such as a wood product, methylcrystalline cellulose, e.g., Avicel®, Avicel® PH101, Avicel® PH102, Avicel® PH105, Elcema® P100, Emcocel®, Vivacel®, Ming Tia®, and Solka-Floc®, methylcellulose, croscarmellose, or a cross-linked cellulose, such as cross-linked sodium carboxymethylcellulose (Ac-Di-Sol®), cross-linked carboxymethylcellulose, or cross-linked croscarmellose, a cross-linked starch such as sodium starch glycolate, a cross-linked polymer such as crospovidone, a cross-linked polyvinylpyrrolidone, alginate such as alginic acid or a salt of alginic acid such as sodium alginate, a clay such as Veegum® HV (magnesium aluminum silicate), a gum such as agar, guar, locust bean, Karaya, pectin, or tragacanth, sodium starch glycolate, bentonite, a natural sponge, a surfactant, a resin such as a cation-exchange resin, citrus pulp, sodium lauryl sulfate, sodium lauryl sulfate in combination starch, and the like.

[0563] In some instances, the pharmaceutical formulations include filling agents such as lactose, calcium carbonate, calcium phosphate, dibasic calcium phosphate, calcium sulfate, microcrystalline cellulose, cellulose powder, dextrose, dextrates, dextran, starches, pregelatinized starch, sucrose, xylitol, lactitol, mannitol, sorbitol, sodium chloride, polyethylene glycol, and the like.

[0564] Lubricants and glidants are also optionally included in the pharmaceutical formulations described herein for preventing, reducing or inhibiting adhesion or friction of materials. Exemplary lubricants include, e.g., stearic acid, calcium hydroxide, talc, sodium stearyl fumerate, a hydrocarbon such as mineral oil, or hydrogenated vegetable oil such as hydrogenated soybean oil (Sterotex®), higher fatty acids and their alkali-metal and alkaline earth metal salts, such as aluminum, calcium, magnesium, zinc, stearic acid, sodium stearates, glycerol, talc, waxes, Stearowet®, boric acid, sodium benzoate, sodium acetate, sodium chloride, leucine, a polyethylene glycol (e.g., PEG-4000) or a methoxypolyethylene glycol such as Carbowax™, sodium oleate, sodium benzoate, glyceryl behenate, polyethylene glycol, magnesium or sodium lauryl sulfate, colloidal silica such as Syloid™, Cab_O-Sil®, a starch such as corn starch, silicone oil, a surfactant, and the like.

[0565] Plasticizers include compounds used to soften the microencapsulation material or film coatings to make them less brittle. Suitable plasticizers include, e.g., polyethylene glycols such as PEG 300, PEG 400, PEG 600, PEG 1450, PEG 3350, and PEG 800, stearic acid, propylene glycol, oleic acid, triethyl cellulose and triacetin. Plasticizers can also function as dispersing agents or wetting agents.

[0566] Solubilizers include compounds such as triacetin, triethylcitrate, ethyl oleate, ethyl caprylate, sodium lauryl sulfate, sodium doccusate, vitamin E TPGS, dimethylacetamide, N-methylpyrrolidone, N-hydroxyethylpyrrolidone, polyvinylpyrrolidone, hydroxypropylmethyl cellulose, hydroxypropyl cyclodextrins, ethanol, n-butanol, isopropyl alcohol, cholesterol, bile salts, polyethylene glycol 200-600, glycofurol, transcutol, propylene glycol, dimethyl isosorbide, and the like.

[0567] Stabilizers include compounds such as any antioxidation agents, buffers, acids, preservatives and the like.

[0568] Suspending agents include compounds such as polyvinylpyrrolidone, e.g., polyvinylpyrrolidone K12, polyvinylpyrrolidone K17, polyvinylpyrrolidone K25, or polyvinylpyrrolidone K30, vinyl pyrrolidone/vinyl acetate copolymer (S630), polyethylene glycol, e.g., the polyethylene glycol can have a molecular weight of about 300 to about 6000, or about 3350 to about 4000, or about 7000 to about 5400, sodium carboxymethylcellulose, methylcellulose, hydroxypropylmethylcellulose, hydroxymethylcellulose acetate stearate, polysorbate-80, hydroxyethylcellulose, sodium alginate, gums, such as, e.g., gum tragacanth and gum acacia, guar gum, xanthans, including xanthan gum, sugars, cellulosics, such as, e.g., sodium carboxymethylcellulose, methylcellulose, sodium carboxymethylcellulose, hydroxypropylmethylcellulose, hydroxyethylcellulose, polysorbate-80, sodium alginate, polyethoxylated sorbitan monolaurate, polyethoxylated sorbitan monolaurate, povidone and the like.

[0569] Surfactants include compounds such as sodium lauryl sulfate, sodium docusate, Tween 60 or 80, triacetin, vitamin E TPGS, sorbitan monooleate, polyoxyethylene sorbitan monooleate, polysorbates, polaxomers, bile salts, glyceryl monostearate, copolymers of ethylene oxide and propylene oxide, e.g., Pluronic® (BASF), and the like. Additional surfactants include polyoxyethylene fatty acid glycerides and vegetable oils, e.g., polyoxyethylene (60) hydrogenated castor oil; and polyoxyethylene alkylethers and alkylphenyl ethers, e.g., octoxynol 10, octoxynol 40. Sometimes, surfactants is included to enhance physical stability or for other purposes.

[0570] Viscosity enhancing agents include, e.g., methyl cellulose, xanthan gum, carboxymethyl cellulose, hydroxypropyl cellulose, hydroxypropylmethyl cellulose, hydroxypropylmethyl cellulose acetate stearate, hydroxypropylmethyl cellulose phthalate, carbomer, polyvinyl alcohol, alginates, acacia, chitosans and combinations thereof.

[0571] Wetting agents include compounds such as oleic acid, glyceryl monostearate, sorbitan monooleate, sorbitan monolaurate, triethanolamine oleate, polyoxyethylene sorbitan monooleate, polyoxyethylene sorbitan monolaurate, sodium docusate, sodium oleate, sodium lauryl sulfate, sodium doccusate, triacetin, Tween 80, vitamin E TPGS, ammonium salts and the like.

### Therapeutic Regimens

[0572] In some embodiments, the pharmaceutical compositions described herein are administered for therapeutic applications. In some embodiments, the pharmaceutical composition is administered once per day, twice per day, three times per day or more. The pharmaceutical composition is administered daily, every day, every alternate day, five days a week, once a week, every other week, two weeks per month, three weeks per month, once a month, twice a month, three times per month, or more. The pharmaceutical composition is administered for at least 1 month, 2 months, 3 months, 4 months, 5 months, 6 months, 7 months, 8 months, 9 months, 10 months, 11 months, 12 months, 18 months, 2 years, 3 years, or more.

[0573] In some embodiments, one or more pharmaceutical compositions are administered simutaneously, sequentially, or at an interval period of time. In some embodiments, one or more pharmaceutical compositions are administered simutaneously. In some cases, one or more pharmaceutical compositions are administered sequentially. In additional cases, one or more pharmaceutical compositions are administered at an interval period of time (e.g., the first administration of a first pharmaceutical composition is on day one followed by an interval of at least 1, 2, 3, 4, 5, or more days prior to the administration of at least a second pharmaceutical composition).

[0574] In some embodiments, two or more different pharmaceutical compositions are coadministered. In some instances, the two or more different pharmaceutical compositions are coadministered simutaneously. In some cases, the two or more different pharmaceutical compositions are coadministered sequentially without a gap of time between administrations. In other cases, the two or more different pharmaceutical compositions are coadministered sequentially with a gap of about 0.5 hour, 1 hour, 2 hour, 3 hour, 12 hours, 1 day, 2 days, or more between administrations.

[0575] In the case wherein the patient's status does improve, upon the doctor's discretion the administration of the composition is given continuously; alternatively, the dose of the composition being administered is temporarily reduced or temporarily suspended for a certain length of time (i.e., a “drug holiday”). In some instances, the length of the drug holiday varies between 2 days and 1 year, including by way of example only, 2 days, 3 days, 4 days, 5 days, 6 days, 7 days, 10 days, 12 days, 15 days, 20 days, 28 days, 35 days, 50 days, 70 days, 100 days, 120 days, 150 days, 180 days, 200 days, 250 days, 280 days, 300 days, 320 days, 350 days, or 365 days. The dose reduction during a drug holiday is from 10%-100%, including, by way of example only, 10%, 15%, 20%, 25%, 30%, 35%, 40%, 45%, 50%, 55%, 60%, 65%, 70%, 75%, 80%, 85%, 90%, 95%, or 100%.

[0576] Once improvement of the patient's conditions has occurred, a maintenance dose is administered if necessary. Subsequently, the dosage or the frequency of administration, or both, are optionally reduced, as a function of the symptoms, to a level at which the improved disease, disorder or condition is retained.

[0577] In some embodiments, the amount of a given agent that correspond to such an amount varies depending upon factors such as the particular compound, the severity of the disease, the identity (e.g., weight) of the subject or host in need of treatment, but nevertheless is routinely determined in a manner known in the art according to the particular circumstances surrounding the case, including, e.g., the specific agent being administered, the route of administration, and the subject or host being treated. In some instances, the desired dose is conveniently presented in a single dose or as divided doses administered simultaneously (or over a short period of time) or at appropriate intervals, for example as two, three, four or more sub-doses per day.

[0578] The foregoing ranges are merely suggestive, as the number of variables in regard to an individual treatment regime is large, and considerable excursions from these recommended values are not uncommon. Such dosages are altered depending on a number of variables, not limited to the activity of the compound used, the disease or condition to be treated, the mode of administration, the requirements of the individual subject, the severity of the disease or condition being treated, and the judgment of the practitioner.

[0579] In some embodiments, toxicity and therapeutic efficacy of such therapeutic regimens are determined by standard pharmaceutical procedures in cell cultures or experimental animals, including, but not limited to, the determination of the LD50 (the dose lethal to 50% of the population) and the ED50 (the dose therapeutically effective in 50% of the population). The dose ratio between the toxic and therapeutic effects is the therapeutic index and it is expressed as the ratio between LD50 and ED50. Compounds exhibiting high therapeutic indices are preferred. The data obtained from cell culture assays and animal studies are used in formulating a range of dosage for use in human. The dosage of such compounds lies preferably within a range of circulating concentrations that include the ED50 with minimal toxicity. The dosage varies within this range depending upon the dosage form employed and the route of administration utilized.

### Kits/Article of Manufacture

[0580] Disclosed herein, in certain embodiments, are kits and articles of manufacture for use with one or more of the compositions and methods described herein. Such kits include a carrier, package, or container that is compartmentalized to receive one or more containers such as vials, tubes, and the like, each of the container(s) comprising one of the separate elements to be used in a method described herein. Suitable containers include, for example, bottles, vials, syringes, and test tubes. In one embodiment, the containers are formed from a variety of materials such as glass or plastic.

[0581] The articles of manufacture provided herein contain packaging materials. Examples of pharmaceutical packaging materials include, but are not limited to, blister packs, bottles, tubes, bags, containers, bottles, and any packaging material suitable for a selected formulation and intended mode of administration and treatment.

[0582] For example, the container(s) include a molecule of Formula (I): A-X—B—Y—C, optionally conjugated to an endosomolytic moiety D as disclosed herein. Such kits optionally include an identifying description or label or instructions relating to its use in the methods described herein.

[0583] A kit typically includes labels listing contents and/or instructions for use and package inserts with instructions for use. A set of instructions will also typically be included.

[0584] In one embodiment, a label is on or associated with the container. In one embodiment, a label is on a container when letters, numbers, or other characters forming the label are attached, molded or etched into the container itself; a label is associated with a container when it is present within a receptacle or carrier that also holds the container, e.g., as a package insert. In one embodiment, a label is used to indicate that the contents are to be used for a specific therapeutic application. The label also indicates directions for use of the contents, such as in the methods described herein.

[0585] In certain embodiments, the pharmaceutical compositions are presented in a pack or dispenser device which contains one or more unit dosage forms containing a compound provided herein. The pack, for example, contains metal or plastic foil, such as a blister pack. In one embodiment, the pack or dispenser device is accompanied by instructions for administration. In one embodiment, the pack or dispenser is also accompanied with a notice associated with the container in form prescribed by a governmental agency regulating the manufacture, use, or sale of pharmaceuticals, which notice is reflective of approval by the agency of the form of the drug for human or veterinary administration. Such notice, for example, is the labeling approved by the U.S. Food and Drug Administration for prescription drugs, or the approved product insert. In one embodiment, compositions containing a compound provided herein formulated in a compatible pharmaceutical carrier are also prepared, placed in an appropriate container, and labeled for treatment of an indicated condition.

### Certain Terminology

[0586] Unless defined otherwise, all technical and scientific terms used herein have the same meaning as is commonly understood by one of skill in the art to which the claimed subject matter belongs. It is to be understood that the foregoing general description and the following detailed description are exemplary and explanatory only and are not restrictive of any subject matter claimed. In this application, the use of the singular includes the plural unless specifically stated otherwise. It must be noted that, as used in the specification and the appended claims, the singular forms “a,” “an” and “the” include plural referents unless the context clearly dictates otherwise. In this application, the use of “or” means “and/or” unless stated otherwise. Furthermore, use of the term “including” as well as other forms, such as “include”, “includes,” and “included,” is not limiting.

[0587] As used herein, ranges and amounts can be expressed as “about” a particular value or range. About also includes the exact amount. Hence “about 5 μL” means “about 5 μL” and also “5 μL.” Generally, the term “about” includes an amount that is expected to be within experimental error.

[0588] The section headings used herein are for organizational purposes only and are not to be construed as limiting the subject matter described.

[0589] As used herein, the terms “individual(s)”, “subject(s)” and “patient(s)” mean any mammal. In some embodiments, the mammal is a human. In some embodiments, the mammal is a non-human. None of the terms require or are limited to situations characterized by the supervision (e.g. constant or intermittent) of a health care worker (e.g. a doctor, a registered nurse, a nurse practitioner, a physician's assistant, an orderly or a hospice worker).

### EXAMPLES

[0590] These examples are provided for illustrative purposes only and not to limit the scope of the claims provided herein.

### Example 1. Sequences

[0591] Tables 1, 4, 7, 8, and 10 illustrate target sequences described herein. Tables 2, 3, 5, 6, 9, 11, and 12 illustrate polynucleic acid molecule sequences described herein.

TABLE 1
KRAS Target Sequences

| | sequence | | SEQ |
|---|---|---|---|
| | position in | | ID |
| Id # | NM_033360.2 | target site in NM_033360.2 | NO: |
| 182 | 182-200 | AAAUGACUGAAUAUAAACUUGUG | 1 |
| 183 | 183-201 | AAUGACUGAAUAUAAACUUGUGG | 2 |
| 197 | 197-215 | AACUUGUGGUAGUUGGAGCUGGU | 3 |
| 224 | 224-242 | UAGGCAAGAGUGCCUUGACGAUA | 4 |
| 226 | 226-244 | GGCAAGAGUGCCUUGACGAUACA | 5 |
| 227 | 227-245 | GCAAGAGUGCCUUGACGAUACAG | 6 |
| 228 | 228-246 | CAAGAGUGCCUUGACGAUACAGC | 7 |
| 232 | 232-250 | AGUGCCUUGACGAUACAGCUAAU | 8 |
| 233 | 233-251 | GUGCCUUGACGAUACAGCUAAUU | 9 |
| 236 | 236-254 | CCUUGACGAUACAGCUAAUUCAG | 10 |
| 237 | 237-255 | CUUGACGAUACAGCUAAUUCAGA | 11 |
| 245 | 245-263 | UACAGCUAAUUCAGAAUCAUUUU | 12 |
| 266 | 266-284 | UUGUGGACGAAUAUGAUCCAACA | 13 |
| 269 | 269-287 | UGGACGAAUAUGAUCCAACAAUA | 14 |
| 270 | 270-288 | GGACGAAUAUGAUCCAACAAUAG | 15 |

TABLE 2
KRAS siRNA sequences

| | sequence | | | | |
|---|---|---|---|---|---|
| | position in | | SEQ | | SEQ |
| | NM_033360. | | ID | antisense strand | ID |
| Id # | 2 | sense strand sequence (5′-3′) | NO: | sequence (5′-3′) | NO: |
| 182 | 182-200 | AUGACUGAAUAUAAACU | 16 | CAAGUUUAUAUUCAG | 17 |
| | | UGTT | | UCAUTT | |
| 183 | 183-201 | UGACUGAAUAUAAACUU | 18 | ACAAGUUUAUAUUCA | 19 |
| | | GUTT | | GUCATT | |
| 197 | 197-215 | CUUGUGGUAGUUGGAGC | 20 | CAGCUCCAACUACCA | 21 |
| | | UGTT | | CAAGTT | |
| 224 | 224-242 | GGCAAGAGUGCCUUGAC | 22 | UCGUCAAGGCACUCU | 23 |
| | | GATT | | UGCCTT | |
| 226 | 226-244 | CAAGAGUGCCUUGACGA | 24 | UAUCGUCAAGGCACU | 25 |
| | | UATT | | CUUGTT | |
| 227 | 227-245 | AAGAGUGCCUUGACGAU | 26 | GUAUCGUCAAGGCAC | 27 |
| | | ACTT | | UCUUTT | |
| 228 | 228-246 | AGAGUGCCUUGACGAUA | 28 | UGUAUCGUCAAGGCA | 29 |
| | | CATT | | CUCUTT | |
| 232 | 232-250 | UGCCUUGACGAUACAGC | 30 | UAGCUGUAUCGUCAA | 31 |
| | | UATT | | GGCATT | |
| 233 | 233-251 | GCCUUGACGAUACAGCU | 32 | UUAGCUGUAUCGUCA | 33 |
| | | AATT | | AGGCTT | |
| 236 | 236-254 | UUGACGAUACAGCUAAU | 34 | GAAUUAGCUGUAUCG | 35 |
| | | UCTT | | UCAATT | |
| 237 | 237-255 | UGACGAUACAGCUAAUU | 36 | UGAAUUAGCUGUAUC | 37 |
| | | CATT | | GUCATT | |
| 245 | 245-263 | CAGCUAAUUCAGAAUCA | 38 | AAUGAUUCUGAAUUA | 39 |
| | | UUTT | | GCUGTT | |
| 266 | 266-284 | GUGGACGAAUAUGAUCC | 40 | UUGGAUCAUAUUCGU | 41 |
| | | AATT | | CCACTT | |
| 269 | 269-287 | GACGAAUAUGAUCCAAC | 42 | UUGUUGGAUCAUAUU | 43 |
| | | AATT | | CGUCTT | |
| 270 | 270-288 | ACGAAUAUGAUCCAACA | 44 | AUUGUUGGAUCAUAU | 45 |
| | | AUTT | | UCGUTT | |

TABLE 3
KRAS siRNA Sequences with Chemical Modification

| | | siRNA sequence with | | siRNA sequence with | |
|---|---|---|---|---|---|
| | | chemical modification | SEQ | chemical modification | SEQ |
| | sequence position | sense strand sequence | ID | antisense strand sequence | ID |
| Id # | in NM_033360.2 | (5′-3′) | NO: | (5′-3′) | NO |
| 182 | 182-200 | auGfaCfuGfaAfuAfuAf | 46 | CfAfaGfuUfuAfuAfuUfcAfg | 47 |
| | | aAfcUfuGfdTsdT | | UfcAfudTsdT | |
| 183 | 183-201 | ugAfcUfgAfaUfaUfaAf | 48 | AfCfaAfgUfuUfaUfaUfuCfaG | 49 |
| | | aCfuUfgUfdTsdT | | fuCfadTsdT | |
| 197 | 197-215 | cuUfgUfgGfuAfgUfuG | 50 | CfAfgCfuCfcAfaCfuAfcCfaCf | 51 |
| | | fgAfgCfuGfdTsdT | | aAfgdTsdT | |
| 224 | 224-242 | ggCfaAfgAfgUfgCfcUf | 52 | UfCfgUfcAfaGfgCfaCfuCfuU | 53 |
| | | uGfaCfgAfdTsdT | | fgCfcdTsdT | |
| 226 | 226-244 | caAfgAfgUfgCfcUfuGf | 54 | UfAfuCfgUfcAfaGfgCfaCfuC | 55 |
| | | aCfgAfuAfdTsdT | | fuUfgdTsdT | |
| 227 | 227-245 | aaGfaGfuGfcCfuUfgAf | 56 | GfUfaUfcGfuCfaAfgGfcAfcU | 57 |
| | | cGfaUfaCfdTsdT | | fcUfudTsdT | |
| 228 | 228-246 | agAfgUfgCfcUfuGfaCf | 58 | UfGfuAfuCfgUfcAfaGfgCfaC | 59 |
| | | gAfuAfcAfdTsdT | | fuCfudTsdT | |
| 232 | 232-250 | ugCfcUfuGfaCfgAfuAf | 60 | UfAfgCfuGfuAfuCfgUfcAfaG | 61 |
| | | cAfgCfuAfdTsdT | | fgCfadTsdT | |
| 233 | 233-251 | gcCfuUfgAfcGfaUfaCf | 62 | UfUfaGfcUfgUfaUfcGfuCfaA | 63 |
| | | aGfcUfaAfdTsdT | | fgGfcdTsdT | |
| 236 | 236-254 | uuGfaCfgAfuAfcAfgCf | 64 | GfAfaUfuAfgCfuGfuAfuCfg | 65 |
| | | uAfaUfuCfdTsdT | | UfcAfadTsdT | |
| 237 | 237-255 | ugAfcGfaUfaCfaGfcUf | 66 | UfGfaAfuUfaGfcUfgUfaUfcG | 67 |
| | | aAfuUfcAfdTsdT | | fuCfadTsdT | |
| 245 | 245-263 | caGfcUfaAfuUfcAfgAf | 68 | AfAfuGfaUfuCfuGfaAfuUfaG | 69 |
| | | aUfcAfuUfdTsdT | | fcUfgdTsdT | |
| 266 | 266-284 | guGfgAfcGfaAfuAfuG | 70 | UfUfgGfaUfcAfuAfuUfcGfuC | 71 |
| | | faUfcCfaAfdTsdT | | fcAfcdTsdT | |
| 269 | 269-287 | gaCfgAfaUfaUfgAfuCf | 72 | UfUfgUfuGfgAfuCfaUfaUfuC | 73 |
| | | cAfaCfaAfdTsdT | | fgUfcdTsdT | |
| 270 | 270-288 | acGfaAfuAfuGfaUfcCf | 74 | AfUfuGfuUfgGfaUfcAfuAfu | 75 |
| | | aAfcAfaUfdTsdT | | UfcGfudTsdT | |

siRNA Sequence with Chemical Modification Info lower case (n) = 2′-O-Me; Nf = 2′-F; dT = deoxy-T residue; s = phosphorothioate backbone modification; iB = inverted abasic

TABLE 4
EGFR Target Sequences

| | 19 mer pos. | | SEQ |
|---|---|---|---|
| hs Id | in | sequence of total 23 mer | ID |
| # | NM_005228.3 | target site in NM_005228.3 | NO: |
| 68 | 68-86 | GGCGGCCGGAGUCCCGAGCUAGC | 76 |
| 71 | 71-89 | GGCCGGAGUCCCGAGCUAGCCCC | 77 |
| 72 | 72-90 | GCCGGAGUCCCGAGCUAGCCCCG | 78 |
| 73 | 73-91 | CCGGAGUCCCGAGCUAGCCCCGG | 79 |
| 74 | 74-92 | CGGAGUCCCGAGCUAGCCCCGGC | 80 |
| 75 | 75-93 | GGAGUCCCGAGCUAGCCCCGGCG | 81 |
| 76 | 76-94 | GAGUCCCGAGCUAGCCCCGGCGG | 82 |
| 78 | 78-96 | GUCCCGAGCUAGCCCCGGCGGCC | 83 |
| 114 | 114-132 | CCGGACGACAGGCCACCUCGUCG | 84 |
| 115 | 115-133 | CGGACGACAGGCCACCUCGUCGG | 85 |
| 116 | 116-134 | GGACGACAGGCCACCUCGUCGGC | 86 |
| 117 | 117-135 | GACGACAGGCCACCUCGUCGGCG | 87 |
| 118 | 118-136 | ACGACAGGCCACCUCGUCGGCGU | 88 |
| 120 | 120-138 | GACAGGCCACCUCGUCGGCGUCC | 89 |
| 121 | 121-139 | ACAGGCCACCUCGUCGGCGUCCG | 90 |
| 122 | 122-140 | CAGGCCACCUCGUCGGCGUCCGC | 91 |
| 123 | 123-141 | AGGCCACCUCGUCGGCGUCCGCC | 92 |
| 124 | 124-142 | GGCCACCUCGUCGGCGUCCGCCC | 93 |
| 125 | 125-143 | GCCACCUCGUCGGCGUCCGCCCG | 94 |
| 126 | 126-144 | CCACCUCGUCGGCGUCCGCCCGA | 95 |
| 127 | 127-145 | CACCUCGUCGGCGUCCGCCCGAG | 96 |
| 128 | 128-146 | ACCUCGUCGGCGUCCGCCCGAGU | 97 |
| 129 | 129-147 | CCUCGUCGGCGUCCGCCCGAGUC | 98 |
| 130 | 130-148 | CUCGUCGGCGUCCGCCCGAGUCC | 99 |
| 131 | 131-149 | UCGUCGGCGUCCGCCCGAGUCCC | 100 |
| 132 | 132-150 | CGUCGGCGUCCGCCCGAGUCCCC | 101 |
| 135 | 135-153 | CGGCGUCCGCCCGAGUCCCCGCC | 102 |
| 136 | 136-154 | GGCGUCCGCCCGAGUCCCCGCCU | 103 |
| 141 | 141-159 | CCGCCCGAGUCCCCGCCUCGCCG | 104 |
| 164 | 164-182 | CCAACGCCACAACCACCGCGCAC | 105 |
| 165 | 165-183 | CAACGCCACAACCACCGCGCACG | 106 |
| 166 | 166-184 | AACGCCACAACCACCGCGCACGG | 107 |
| 168 | 168-186 | CGCCACAACCACCGCGCACGGCC | 108 |
| 169 | 169-187 | GCCACAACCACCGCGCACGGCCC | 109 |
| 170 | 170-188 | CCACAACCACCGCGCACGGCCCC | 110 |
| 247 | 247-265 | CGAUGCGACCCUCCGGGACGGCC | 111 |
| 248 | 248-266 | GAUGCGACCCUCCGGGACGGCCG | 112 |
| 249 | 249-267 | AUGCGACCCUCCGGGACGGCCGG | 113 |
| 251 | 251-269 | GCGACCCUCCGGGACGGCCGGGG | 114 |
| 252 | 252-270 | CGACCCUCCGGGACGGCCGGGGC | 115 |
| 254 | 254-272 | ACCCUCCGGGACGGCCGGGGCAG | 116 |
| 329 | 329-347 | AAAGAAAGUUUGCCAAGGCACGA | 117 |
| 330 | 330-348 | AAGAAAGUUUGCCAAGGCACGAG | 118 |
| 332 | 332-350 | GAAAGUUUGCCAAGGCACGAGUA | 119 |
| 333 | 333-351 | AAAGUUUGCCAAGGCACGAGUAA | 120 |
| 334 | 334-352 | AAGUUUGCCAAGGCACGAGUAAC | 121 |
| 335 | 335-353 | AGUUUGCCAAGGCACGAGUAACA | 122 |
| 336 | 336-354 | GUUUGCCAAGGCACGAGUAACAA | 123 |
| 337 | 337-355 | UUUGCCAAGGCACGAGUAACAAG | 124 |
| 338 | 338-356 | UUGCCAAGGCACGAGUAACAAGC | 125 |
| 361 | 361-379 | UCACGCAGUUGGGCACUUUUGAA | 126 |
| 362 | 362-380 | CACGCAGUUGGGCACUUUUGAAG | 127 |
| 363 | 363-381 | ACGCAGUUGGGCACUUUUGAAGA | 128 |
| 364 | 364-382 | CGCAGUUGGGCACUUUUGAAGAU | 129 |
| 365 | 365-383 | GCAGUUGGGCACUUUUGAAGAUC | 130 |
| 366 | 366-384 | CAGUUGGGCACUUUUGAAGAUCA | 131 |
| 367 | 367-385 | AGUUGGGCACUUUUGAAGAUCAU | 132 |
| 368 | 368-386 | GUUGGGCACUUUUGAAGAUCAUU | 133 |
| 369 | 369-387 | UUGGGCACUUUUGAAGAUCAUUU | 134 |
| 377 | 377-395 | UUUUGAAGAUCAUUUUCUCAGCC | 135 |
| 379 | 379-397 | UUGAAGAUCAUUUUCUCAGCCUC | 136 |
| 380 | 380-398 | UGAAGAUCAUUUUCUCAGCCUCC | 137 |
| 385 | 385-403 | AUCAUUUUCUCAGCCUCCAGAGG | 138 |
| 394 | 394-412 | UCAGCCUCCAGAGGAUGUUCAAU | 139 |
| 396 | 396-414 | AGCCUCCAGAGGAUGUUCAAUAA | 140 |
| 397 | 397-415 | GCCUCCAGAGGAUGUUCAAUAAC | 141 |
| 401 | 401-419 | CCAGAGGAUGUUCAAUAACUGUG | 142 |
| 403 | 403-421 | AGAGGAUGUUCAAUAACUGUGAG | 143 |
| 407 | 407-425 | GAUGUUCAAUAACUGUGAGGUGG | 144 |
| 409 | 409-427 | UGUUCAAUAACUGUGAGGUGGUC | 145 |
| 410 | 410-428 | GUUCAAUAACUGUGAGGUGGUCC | 146 |
| 411 | 411-429 | UUCAAUAACUGUGAGGUGGUCCU | 147 |
| 412 | 412-430 | UCAAUAACUGUGAGGUGGUCCUU | 148 |
| 413 | 413-431 | CAAUAACUGUGAGGUGGUCCUUG | 149 |
| 414 | 414-432 | AAUAACUGUGAGGUGGUCCUUGG | 150 |
| 416 | 416-434 | UAACUGUGAGGUGGUCCUUGGGA | 151 |
| 418 | 418-436 | ACUGUGAGGUGGUCCUUGGGAAU | 152 |
| 419 | 419-437 | CUGUGAGGUGGUCCUUGGGAAUU | 153 |
| 425 | 425-443 | GGUGGUCCUUGGGAAUUUGGAAA | 154 |
| 431 | 431-449 | CCUUGGGAAUUUGGAAAUUACCU | 155 |
| 432 | 432-450 | CUUGGGAAUUUGGAAAUUACCUA | 156 |
| 433 | 433-451 | UUGGGAAUUUGGAAAUUACCUAU | 157 |
| 434 | 434-452 | UGGGAAUUUGGAAAUUACCUAUG | 158 |
| 458 | 458-476 | GCAGAGGAAUUAUGAUCUUUCCU | 159 |
| 459 | 459-477 | CAGAGGAAUUAUGAUCUUUCCUU | 160 |
| 463 | 463-481 | GGAAUUAUGAUCUUUCCUUCUUA | 161 |
| 464 | 464-482 | GAAUUAUGAUCUUUCCUUCUUAA | 162 |
| 466 | 466-484 | AUUAUGAUCUUUCCUUCUUAAAG | 163 |
| 468 | 468-486 | UAUGAUCUUUCCUUCUUAAAGAC | 164 |
| 471 | 471-489 | GAUCUUUCCUUCUUAAAGACCAU | 165 |
| 476 | 476-494 | UUCCUUCUUAAAGACCAUCCAGG | 166 |
| 477 | 477-495 | UCCUUCUUAAAGACCAUCCAGGA | 167 |
| 479 | 479-497 | CUUCUUAAAGACCAUCCAGGAGG | 168 |
| 481 | 481-499 | UCUUAAAGACCAUCCAGGAGGUG | 169 |
| 482 | 482-500 | CUUAAAGACCAUCCAGGAGGUGG | 170 |
| 492 | 492-510 | AUCCAGGAGGUGGCUGGUUAUGU | 171 |
| 493 | 493-511 | UCCAGGAGGUGGCUGGUUAUGUC | 172 |
| 494 | 494-512 | CCAGGAGGUGGCUGGUUAUGUCC | 173 |
| 495 | 495-513 | CAGGAGGUGGCUGGUUAUGUCCU | 174 |
| 496 | 496-514 | AGGAGGUGGCUGGUUAUGUCCUC | 175 |
| 497 | 497-515 | GGAGGUGGCUGGUUAUGUCCUCA | 176 |
| 499 | 499-517 | AGGUGGCUGGUUAUGUCCUCAUU | 177 |
| 520 | 520-538 | UUGCCCUCAACACAGUGGAGCGA | 178 |
| 542 | 542-560 | AAUUCCUUUGGAAAACCUGCAGA | 179 |
| 543 | 543-561 | AUUCCUUUGGAAAACCUGCAGAU | 180 |
| 550 | 550-568 | UGGAAAACCUGCAGAUCAUCAGA | 181 |
| 551 | 551-569 | GGAAAACCUGCAGAUCAUCAGAG | 182 |
| 553 | 553-571 | AAAACCUGCAGAUCAUCAGAGGA | 183 |
| 556 | 556-574 | ACCUGCAGAUCAUCAGAGGAAAU | 184 |
| 586 | 586-604 | ACGAAAAUUCCUAUGCCUUAGCA | 185 |
| 587 | 587-605 | CGAAAAUUCCUAUGCCUUAGCAG | 186 |
| 589 | 589-607 | AAAAUUCCUAUGCCUUAGCAGUC | 187 |
| 592 | 592-610 | AUUCCUAUGCCUUAGCAGUCUUA | 188 |
| 593 | 593-611 | UUCCUAUGCCUUAGCAGUCUUAU | 189 |
| 594 | 594-612 | UCCUAUGCCUUAGCAGUCUUAUC | 190 |
| 596 | 596-614 | CUAUGCCUUAGCAGUCUUAUCUA | 191 |
| 597 | 597-615 | UAUGCCUUAGCAGUCUUAUCUAA | 192 |
| 598 | 598-616 | AUGCCUUAGCAGUCUUAUCUAAC | 193 |
| 599 | 599-617 | UGCCUUAGCAGUCUUAUCUAACU | 194 |
| 600 | 600-618 | GCCUUAGCAGUCUUAUCUAACUA | 195 |
| 601 | 601-619 | CCUUAGCAGUCUUAUCUAACUAU | 196 |
| 602 | 602-620 | CUUAGCAGUCUUAUCUAACUAUG | 197 |
| 603 | 603-621 | UUAGCAGUCUUAUCUAACUAUGA | 198 |
| 604 | 604-622 | UAGCAGUCUUAUCUAACUAUGAU | 199 |
| 605 | 605-623 | AGCAGUCUUAUCUAACUAUGAUG | 200 |
| 608 | 608-626 | AGUCUUAUCUAACUAUGAUGCAA | 201 |
| 609 | 609-627 | GUCUUAUCUAACUAUGAUGCAAA | 202 |
| 610 | 610-628 | UCUUAUCUAACUAUGAUGCAAAU | 203 |
| 611 | 611-629 | CUUAUCUAACUAUGAUGCAAAUA | 204 |
| 612 | 612-630 | UUAUCUAACUAUGAUGCAAAUAA | 205 |
| 613 | 613-631 | UAUCUAACUAUGAUGCAAAUAAA | 206 |
| 614 | 614-632 | AUCUAACUAUGAUGCAAAUAAAA | 207 |
| 616 | 616-634 | CUAACUAUGAUGCAAAUAAAACC | 208 |
| 622 | 622-640 | AUGAUGCAAAUAAAACCGGACUG | 209 |
| 623 | 623-641 | UGAUGCAAAUAAAACCGGACUGA | 210 |
| 624 | 624-642 | GAUGCAAAUAAAACCGGACUGAA | 211 |
| 626 | 626-644 | UGCAAAUAAAACCGGACUGAAGG | 212 |
| 627 | 627-645 | GCAAAUAAAACCGGACUGAAGGA | 213 |
| 628 | 628-646 | CAAAUAAAACCGGACUGAAGGAG | 214 |
| 630 | 630-648 | AAUAAAACCGGACUGAAGGAGCU | 215 |
| 631 | 631-649 | AUAAAACCGGACUGAAGGAGCUG | 216 |
| 632 | 632-650 | UAAAACCGGACUGAAGGAGCUGC | 217 |
| 633 | 633-651 | AAAACCGGACUGAAGGAGCUGCC | 218 |
| 644 | 644-662 | GAAGGAGCUGCCCAUGAGAAAUU | 219 |
| 665 | 665-683 | UUUACAGGAAAUCCUGCAUGGCG | 220 |
| 668 | 668-686 | ACAGGAAAUCCUGCAUGGCGCCG | 221 |
| 669 | 669-687 | CAGGAAAUCCUGCAUGGCGCCGU | 222 |
| 670 | 670-688 | AGGAAAUCCUGCAUGGCGCCGUG | 223 |
| 671 | 671-689 | GGAAAUCCUGCAUGGCGCCGUGC | 224 |
| 672 | 672-690 | GAAAUCCUGCAUGGCGCCGUGCG | 225 |
| 674 | 674-692 | AAUCCUGCAUGGCGCCGUGCGGU | 226 |
| 676 | 676-694 | UCCUGCAUGGCGCCGUGCGGUUC | 227 |
| 677 | 677-695 | CCUGCAUGGCGCCGUGCGGUUCA | 228 |
| 678 | 678-696 | CUGCAUGGCGCCGUGCGGUUCAG | 229 |
| 680 | 680-698 | GCAUGGCGCCGUGCGGUUCAGCA | 230 |
| 681 | 681-699 | CAUGGCGCCGUGCGGUUCAGCAA | 231 |
| 682 | 682-700 | AUGGCGCCGUGCGGUUCAGCAAC | 232 |
| 683 | 683-701 | UGGCGCCGUGCGGUUCAGCAACA | 233 |
| 684 | 684-702 | GGCGCCGUGCGGUUCAGCAACAA | 234 |
| 685 | 685-703 | GCGCCGUGCGGUUCAGCAACAAC | 235 |
| 686 | 686-704 | CGCCGUGCGGUUCAGCAACAACC | 236 |
| 688 | 688-706 | CCGUGCGGUUCAGCAACAACCCU | 237 |
| 690 | 690-708 | GUGCGGUUCAGCAACAACCCUGC | 238 |
| 692 | 692-710 | GCGGUUCAGCAACAACCCUGCCC | 239 |
| 698 | 698-716 | CAGCAACAACCCUGCCCUGUGCA | 240 |
| 700 | 700-718 | GCAACAACCCUGCCCUGUGCAAC | 241 |
| 719 | 719-737 | CAACGUGGAGAGCAUCCAGUGGC | 242 |
| 720 | 720-738 | AACGUGGAGAGCAUCCAGUGGCG | 243 |
| 721 | 721-739 | ACGUGGAGAGCAUCCAGUGGCGG | 244 |
| 724 | 724-742 | UGGAGAGCAUCCAGUGGCGGGAC | 245 |
| 725 | 725-743 | GGAGAGCAUCCAGUGGCGGGACA | 246 |
| 726 | 726-744 | GAGAGCAUCCAGUGGCGGGACAU | 247 |
| 733 | 733-751 | UCCAGUGGCGGGACAUAGUCAGC | 248 |
| 734 | 734-752 | CCAGUGGCGGGACAUAGUCAGCA | 249 |
| 736 | 736-754 | AGUGGCGGGACAUAGUCAGCAGU | 250 |
| 737 | 737-755 | GUGGCGGGACAUAGUCAGCAGUG | 251 |
| 763 | 763-781 | UUCUCAGCAACAUGUCGAUGGAC | 252 |
| 765 | 765-783 | CUCAGCAACAUGUCGAUGGACUU | 253 |
| 766 | 766-784 | UCAGCAACAUGUCGAUGGACUUC | 254 |
| 767 | 767-785 | CAGCAACAUGUCGAUGGACUUCC | 255 |
| 769 | 769-787 | GCAACAUGUCGAUGGACUUCCAG | 256 |
| 770 | 770-788 | CAACAUGUCGAUGGACUUCCAGA | 257 |
| 771 | 771-789 | AACAUGUCGAUGGACUUCCAGAA | 258 |
| 772 | 772-790 | ACAUGUCGAUGGACUUCCAGAAC | 259 |
| 775 | 775-793 | UGUCGAUGGACUUCCAGAACCAC | 260 |
| 789 | 789-807 | CAGAACCACCUGGGCAGCUGCCA | 261 |
| 798 | 798-816 | CUGGGCAGCUGCCAAAAGUGUGA | 262 |
| 800 | 800-818 | GGGCAGCUGCCAAAAGUGUGAUC | 263 |
| 805 | 805-823 | GCUGCCAAAAGUGUGAUCCAAGC | 264 |
| 806 | 806-824 | CUGCCAAAAGUGUGAUCCAAGCU | 265 |
| 807 | 807-825 | UGCCAAAAGUGUGAUCCAAGCUG | 266 |
| 810 | 810-828 | CAAAAGUGUGAUCCAAGCUGUCC | 267 |
| 814 | 814-832 | AGUGUGAUCCAAGCUGUCCCAAU | 268 |
| 815 | 815-833 | GUGUGAUCCAAGCUGUCCCAAUG | 269 |
| 817 | 817-835 | GUGAUCCAAGCUGUCCCAAUGGG | 270 |
| 818 | 818-836 | UGAUCCAAGCUGUCCCAAUGGGA | 271 |
| 819 | 819-837 | GAUCCAAGCUGUCCCAAUGGGAG | 272 |
| 820 | 820-838 | AUCCAAGCUGUCCCAAUGGGAGC | 273 |
| 821 | 821-839 | UCCAAGCUGUCCCAAUGGGAGCU | 274 |
| 823 | 823-841 | CAAGCUGUCCCAAUGGGAGCUGC | 275 |
| 826 | 826-844 | GCUGUCCCAAUGGGAGCUGCUGG | 276 |
| 847 | 847-865 | GGGGUGCAGGAGAGGAGAACUGC | 277 |
| 871 | 871-889 | AGAAACUGACCAAAAUCAUCUGU | 278 |
| 872 | 872-890 | GAAACUGACCAAAAUCAUCUGUG | 279 |
| 873 | 873-891 | AAACUGACCAAAAUCAUCUGUGC | 280 |
| 877 | 877-895 | UGACCAAAAUCAUCUGUGCCCAG | 281 |
| 878 | 878-896 | GACCAAAAUCAUCUGUGCCCAGC | 282 |
| 881 | 881-899 | CAAAAUCAUCUGUGCCCAGCAGU | 283 |
| 890 | 890-908 | CUGUGCCCAGCAGUGCUCCGGGC | 284 |
| 892 | 892-910 | GUGCCCAGCAGUGCUCCGGGCGC | 285 |
| 929 | 929-947 | CCCCAGUGACUGCUGCCACAACC | 286 |
| 930 | 930-948 | CCCAGUGACUGCUGCCACAACCA | 287 |
| 979 | 979-997 | GGGAGAGCGACUGCCUGGUCUGC | 288 |
| 980 | 980-998 | GGAGAGCGACUGCCUGGUCUGCC | 289 |
| 981 | 981-999 | GAGAGCGACUGCCUGGUCUGCCG | 290 |
| 982 | 982-1000 | AGAGCGACUGCCUGGUCUGCCGC | 291 |
| 983 | 983-1001 | GAGCGACUGCCUGGUCUGCCGCA | 292 |
| 984 | 984-1002 | AGCGACUGCCUGGUCUGCCGCAA | 293 |
| 989 | 989-1007 | CUGCCUGGUCUGCCGCAAAUUCC | 294 |
| 990 | 990-1008 | UGCCUGGUCUGCCGCAAAUUCCG | 295 |
| 991 | 991-1009 | GCCUGGUCUGCCGCAAAUUCCGA | 296 |
| 992 | 992-1010 | CCUGGUCUGCCGCAAAUUCCGAG | 297 |
| 994 | 994-1012 | UGGUCUGCCGCAAAUUCCGAGAC | 298 |
| 995 | 995-1013 | GGUCUGCCGCAAAUUCCGAGACG | 299 |
| 996 | 996-1014 | GUCUGCCGCAAAUUCCGAGACGA | 300 |
| 997 | 997-1015 | UCUGCCGCAAAUUCCGAGACGAA | 301 |
| 999 | 999-1017 | UGCCGCAAAUUCCGAGACGAAGC | 302 |
| 1004 | 1004-1022 | CAAAUUCCGAGACGAAGCCACGU | 303 |
| 1005 | 1005-1023 | AAAUUCCGAGACGAAGCCACGUG | 304 |
| 1006 | 1006-1024 | AAUUCCGAGACGAAGCCACGUGC | 305 |
| 1007 | 1007-1025 | AUUCCGAGACGAAGCCACGUGCA | 306 |
| 1008 | 1008-1026 | UUCCGAGACGAAGCCACGUGCAA | 307 |
| 1010 | 1010-1028 | CCGAGACGAAGCCACGUGCAAGG | 308 |
| 1013 | 1013-1031 | AGACGAAGCCACGUGCAAGGACA | 309 |
| 1014 | 1014-1032 | GACGAAGCCACGUGCAAGGACAC | 310 |
| 1015 | 1015-1033 | ACGAAGCCACGUGCAAGGACACC | 311 |
| 1016 | 1016-1034 | CGAAGCCACGUGCAAGGACACCU | 312 |
| 1040 | 1040-1058 | CCCCCCACUCAUGCUCUACAACC | 313 |
| 1042 | 1042-1060 | CCCCACUCAUGCUCUACAACCCC | 314 |
| 1044 | 1044-1062 | CCACUCAUGCUCUACAACCCCAC | 315 |
| 1047 | 1047-1065 | CUCAUGCUCUACAACCCCACCAC | 316 |
| 1071 | 1071-1089 | UACCAGAUGGAUGUGAACCCCGA | 317 |
| 1073 | 1073-1091 | CCAGAUGGAUGUGAACCCCGAGG | 318 |
| 1074 | 1074-1092 | CAGAUGGAUGUGAACCCCGAGGG | 319 |
| 1075 | 1075-1093 | AGAUGGAUGUGAACCCCGAGGGC | 320 |
| 1077 | 1077-1095 | AUGGAUGUGAACCCCGAGGGCAA | 321 |
| 1078 | 1078-1096 | UGGAUGUGAACCCCGAGGGCAAA | 322 |
| 1080 | 1080-1098 | GAUGUGAACCCCGAGGGCAAAUA | 323 |
| 1084 | 1084-1102 | UGAACCCCGAGGGCAAAUACAGC | 324 |
| 1085 | 1085-1103 | GAACCCCGAGGGCAAAUACAGCU | 325 |
| 1087 | 1087-1105 | ACCCCGAGGGCAAAUACAGCUUU | 326 |
| 1088 | 1088-1106 | CCCCGAGGGCAAAUACAGCUUUG | 327 |
| 1089 | 1089-1107 | CCCGAGGGCAAAUACAGCUUUGG | 328 |
| 1096 | 1096-1114 | GCAAAUACAGCUUUGGUGCCACC | 329 |
| 1097 | 1097-1115 | CAAAUACAGCUUUGGUGCCACCU | 330 |
| 1098 | 1098-1116 | AAAUACAGCUUUGGUGCCACCUG | 331 |
| 1104 | 1104-1122 | AGCUUUGGUGCCACCUGCGUGAA | 332 |
| 1106 | 1106-1124 | CUUUGGUGCCACCUGCGUGAAGA | 333 |
| 1112 | 1112-1130 | UGCCACCUGCGUGAAGAAGUGUC | 334 |
| 1116 | 1116-1134 | ACCUGCGUGAAGAAGUGUCCCCG | 335 |
| 1117 | 1117-1135 | CCUGCGUGAAGAAGUGUCCCCGU | 336 |
| 1118 | 1118-1136 | CUGCGUGAAGAAGUGUCCCCGUA | 337 |
| 1119 | 1119-1137 | UGCGUGAAGAAGUGUCCCCGUAA | 338 |
| 1120 | 1120-1138 | GCGUGAAGAAGUGUCCCCGUAAU | 339 |
| 1121 | 1121-1139 | CGUGAAGAAGUGUCCCCGUAAUU | 340 |
| 1122 | 1122-1140 | GUGAAGAAGUGUCCCCGUAAUUA | 341 |
| 1123 | 1123-1141 | UGAAGAAGUGUCCCCGUAAUUAU | 342 |
| 1124 | 1124-1142 | GAAGAAGUGUCCCCGUAAUUAUG | 343 |
| 1125 | 1125-1143 | AAGAAGUGUCCCCGUAAUUAUGU | 344 |
| 1126 | 1126-1144 | AGAAGUGUCCCCGUAAUUAUGUG | 345 |
| 1127 | 1127-1145 | GAAGUGUCCCCGUAAUUAUGUGG | 346 |
| 1128 | 1128-1146 | AAGUGUCCCCGUAAUUAUGUGGU | 347 |
| 1129 | 1129-1147 | AGUGUCCCCGUAAUUAUGUGGUG | 348 |
| 1130 | 1130-1148 | GUGUCCCCGUAAUUAUGUGGUGA | 349 |
| 1132 | 1132-1150 | GUCCCCGUAAUUAUGUGGUGACA | 350 |
| 1134 | 1134-1152 | CCCCGUAAUUAUGUGGUGACAGA | 351 |
| 1136 | 1136-1154 | CCGUAAUUAUGUGGUGACAGAUC | 352 |
| 1137 | 1137-1155 | CGUAAUUAUGUGGUGACAGAUCA | 353 |
| 1138 | 1138-1156 | GUAAUUAUGUGGUGACAGAUCAC | 354 |
| 1139 | 1139-1157 | UAAUUAUGUGGUGACAGAUCACG | 355 |
| 1140 | 1140-1158 | AAUUAUGUGGUGACAGAUCACGG | 356 |
| 1142 | 1142-1160 | UUAUGUGGUGACAGAUCACGGCU | 357 |
| 1145 | 1145-1163 | UGUGGUGACAGAUCACGGCUCGU | 358 |
| 1147 | 1147-1165 | UGGUGACAGAUCACGGCUCGUGC | 359 |
| 1148 | 1148-1166 | GGUGACAGAUCACGGCUCGUGCG | 360 |
| 1149 | 1149-1167 | GUGACAGAUCACGGCUCGUGCGU | 361 |
| 1150 | 1150-1168 | UGACAGAUCACGGCUCGUGCGUC | 362 |
| 1151 | 1151-1169 | GACAGAUCACGGCUCGUGCGUCC | 363 |
| 1152 | 1152-1170 | ACAGAUCACGGCUCGUGCGUCCG | 364 |
| 1153 | 1153-1171 | CAGAUCACGGCUCGUGCGUCCGA | 365 |
| 1154 | 1154-1172 | AGAUCACGGCUCGUGCGUCCGAG | 366 |
| 1155 | 1155-1173 | GAUCACGGCUCGUGCGUCCGAGC | 367 |
| 1156 | 1156-1174 | AUCACGGCUCGUGCGUCCGAGCC | 368 |
| 1157 | 1157-1175 | UCACGGCUCGUGCGUCCGAGCCU | 369 |
| 1160 | 1160-1178 | CGGCUCGUGCGUCCGAGCCUGUG | 370 |
| 1200 | 1200-1218 | AUGGAGGAAGACGGCGUCCGCAA | 371 |
| 1201 | 1201-1219 | UGGAGGAAGACGGCGUCCGCAAG | 372 |
| 1203 | 1203-1221 | GAGGAAGACGGCGUCCGCAAGUG | 373 |
| 1204 | 1204-1222 | AGGAAGACGGCGUCCGCAAGUGU | 374 |
| 1205 | 1205-1223 | GGAAGACGGCGUCCGCAAGUGUA | 375 |
| 1207 | 1207-1225 | AAGACGGCGUCCGCAAGUGUAAG | 376 |
| 1208 | 1208-1226 | AGACGGCGUCCGCAAGUGUAAGA | 377 |
| 1211 | 1211-1229 | CGGCGUCCGCAAGUGUAAGAAGU | 378 |
| 1212 | 1212-1230 | GGCGUCCGCAAGUGUAAGAAGUG | 379 |
| 1213 | 1213-1231 | GCGUCCGCAAGUGUAAGAAGUGC | 380 |
| 1214 | 1214-1232 | CGUCCGCAAGUGUAAGAAGUGCG | 381 |
| 1215 | 1215-1233 | GUCCGCAAGUGUAAGAAGUGCGA | 382 |
| 1216 | 1216-1234 | UCCGCAAGUGUAAGAAGUGCGAA | 383 |
| 1217 | 1217-1235 | CCGCAAGUGUAAGAAGUGCGAAG | 384 |
| 1219 | 1219-1237 | GCAAGUGUAAGAAGUGCGAAGGG | 385 |
| 1220 | 1220-1238 | CAAGUGUAAGAAGUGCGAAGGGC | 386 |
| 1221 | 1221-1239 | AAGUGUAAGAAGUGCGAAGGGCC | 387 |
| 1222 | 1222-1240 | AGUGUAAGAAGUGCGAAGGGCCU | 388 |
| 1223 | 1223-1241 | GUGUAAGAAGUGCGAAGGGCCUU | 389 |
| 1224 | 1224-1242 | UGUAAGAAGUGCGAAGGGCCUUG | 390 |
| 1225 | 1225-1243 | GUAAGAAGUGCGAAGGGCCUUGC | 391 |
| 1226 | 1226-1244 | UAAGAAGUGCGAAGGGCCUUGCC | 392 |
| 1229 | 1229-1247 | GAAGUGCGAAGGGCCUUGCCGCA | 393 |
| 1230 | 1230-1248 | AAGUGCGAAGGGCCUUGCCGCAA | 394 |
| 1231 | 1231-1249 | AGUGCGAAGGGCCUUGCCGCAAA | 395 |
| 1232 | 1232-1250 | GUGCGAAGGGCCUUGCCGCAAAG | 396 |
| 1233 | 1233-1251 | UGCGAAGGGCCUUGCCGCAAAGU | 397 |
| 1235 | 1235-1253 | CGAAGGGCCUUGCCGCAAAGUGU | 398 |
| 1236 | 1236-1254 | GAAGGGCCUUGCCGCAAAGUGUG | 399 |
| 1237 | 1237-1255 | AAGGGCCUUGCCGCAAAGUGUGU | 400 |
| 1238 | 1238-1256 | AGGGCCUUGCCGCAAAGUGUGUA | 401 |
| 1239 | 1239-1257 | GGGCCUUGCCGCAAAGUGUGUAA | 402 |
| 1241 | 1241-1259 | GCCUUGCCGCAAAGUGUGUAACG | 403 |
| 1261 | 1261-1279 | ACGGAAUAGGUAUUGGUGAAUUU | 404 |
| 1262 | 1262-1280 | CGGAAUAGGUAUUGGUGAAUUUA | 405 |
| 1263 | 1263-1281 | GGAAUAGGUAUUGGUGAAUUUAA | 406 |
| 1264 | 1264-1282 | GAAUAGGUAUUGGUGAAUUUAAA | 407 |
| 1266 | 1266-1284 | AUAGGUAUUGGUGAAUUUAAAGA | 408 |
| 1267 | 1267-1285 | UAGGUAUUGGUGAAUUUAAAGAC | 409 |
| 1289 | 1289-1307 | CUCACUCUCCAUAAAUGCUACGA | 410 |
| 1313 | 1313-1331 | UAUUAAACACUUCAAAAACUGCA | 411 |
| 1320 | 1320-1338 | CACUUCAAAAACUGCACCUCCAU | 412 |
| 1321 | 1321-1339 | ACUUCAAAAACUGCACCUCCAUC | 413 |
| 1322 | 1322-1340 | CUUCAAAAACUGCACCUCCAUCA | 414 |
| 1323 | 1323-1341 | UUCAAAAACUGCACCUCCAUCAG | 415 |
| 1324 | 1324-1342 | UCAAAAACUGCACCUCCAUCAGU | 416 |
| 1328 | 1328-1346 | AAACUGCACCUCCAUCAGUGGCG | 417 |
| 1332 | 1332-1350 | UGCACCUCCAUCAGUGGCGAUCU | 418 |
| 1333 | 1333-1351 | GCACCUCCAUCAGUGGCGAUCUC | 419 |
| 1335 | 1335-1353 | ACCUCCAUCAGUGGCGAUCUCCA | 420 |
| 1338 | 1338-1356 | UCCAUCAGUGGCGAUCUCCACAU | 421 |
| 1344 | 1344-1362 | AGUGGCGAUCUCCACAUCCUGCC | 422 |
| 1345 | 1345-1363 | GUGGCGAUCUCCACAUCCUGCCG | 423 |
| 1346 | 1346-1364 | UGGCGAUCUCCACAUCCUGCCGG | 424 |
| 1347 | 1347-1365 | GGCGAUCUCCACAUCCUGCCGGU | 425 |
| 1348 | 1348-1366 | GCGAUCUCCACAUCCUGCCGGUG | 426 |
| 1353 | 1353-1371 | CUCCACAUCCUGCCGGUGGCAUU | 427 |
| 1354 | 1354-1372 | UCCACAUCCUGCCGGUGGCAUUU | 428 |
| 1355 | 1355-1373 | CCACAUCCUGCCGGUGGCAUUUA | 429 |
| 1357 | 1357-1375 | ACAUCCUGCCGGUGGCAUUUAGG | 430 |
| 1360 | 1360-1378 | UCCUGCCGGUGGCAUUUAGGGGU | 431 |
| 1361 | 1361-1379 | CCUGCCGGUGGCAUUUAGGGGUG | 432 |
| 1362 | 1362-1380 | CUGCCGGUGGCAUUUAGGGGUGA | 433 |
| 1363 | 1363-1381 | UGCCGGUGGCAUUUAGGGGUGAC | 434 |
| 1366 | 1366-1384 | CGGUGGCAUUUAGGGGUGACUCC | 435 |
| 1369 | 1369-1387 | UGGCAUUUAGGGGUGACUCCUUC | 436 |
| 1370 | 1370-1388 | GGCAUUUAGGGGUGACUCCUUCA | 437 |
| 1371 | 1371-1389 | GCAUUUAGGGGUGACUCCUUCAC | 438 |
| 1372 | 1372-1390 | CAUUUAGGGGUGACUCCUUCACA | 439 |
| 1373 | 1373-1391 | AUUUAGGGGUGACUCCUUCACAC | 440 |
| 1374 | 1374-1392 | UUUAGGGGUGACUCCUUCACACA | 441 |
| 1404 | 1404-1422 | CCUCUGGAUCCACAGGAACUGGA | 442 |
| 1408 | 1408-1426 | UGGAUCCACAGGAACUGGAUAUU | 443 |
| 1409 | 1409-1427 | GGAUCCACAGGAACUGGAUAUUC | 444 |
| 1411 | 1411-1429 | AUCCACAGGAACUGGAUAUUCUG | 445 |
| 1412 | 1412-1430 | UCCACAGGAACUGGAUAUUCUGA | 446 |
| 1419 | 1419-1437 | GAACUGGAUAUUCUGAAAACCGU | 447 |
| 1426 | 1426-1444 | AUAUUCUGAAAACCGUAAAGGAA | 448 |
| 1427 | 1427-1445 | UAUUCUGAAAACCGUAAAGGAAA | 449 |
| 1430 | 1430-1448 | UCUGAAAACCGUAAAGGAAAUCA | 450 |
| 1431 | 1431-1449 | CUGAAAACCGUAAAGGAAAUCAC | 451 |

TABLE 5
EGFR siRNA Sequences

| | Sequence | | SEQ | | SEQ |
|---|---|---|---|---|---|
| hs Id | position in | sense strand sequence | ID | antisense strand sequence | ID |
| # | NM_005228.3 | (5′-3′) | NO: | (5′-3′) | NO: |
| 68 | 68-86 | CGGCCGGAGUCCCGAG | 452 | UAGCUCGGGACUCCGGC | 453 |
| | | CUATT | | CGTT | |
| 71 | 71-89 | CCGGAGUCCCGAGCUA | 454 | GGCUAGCUCGGGACUCC | 455 |
| | | GCCTT | | GGTT | |
| 72 | 72-90 | CGGAGUCCCGAGCUAG | 456 | GGGCUAGCUCGGGACUC | 457 |
| | | CCCTT | | CGTT | |
| 73 | 73-91 | GGAGUCCCGAGCUAGC | 458 | GGGGCUAGCUCGGGACU | 459 |
| | | CCCTT | | CCTT | |
| 74 | 74-92 | GAGUCCCGAGCUAGCC | 460 | CGGGGCUAGCUCGGGAC | 461 |
| | | CCGTT | | UCTT | |
| 75 | 75-93 | AGUCCCGAGCUAGCCC | 462 | CCGGGGCUAGCUCGGGA | 463 |
| | | CGGTT | | CUTT | |
| 76 | 76-94 | GUCCCGAGCUAGCCCC | 464 | GCCGGGGCUAGCUCGGG | 465 |
| | | GGCTT | | ACTT | |
| 78 | 78-96 | CCCGAGCUAGCCCCGG | 466 | CCGCCGGGGCUAGCUCG | 467 |
| | | CGGTT | | GGTT | |
| 114 | 114-132 | GGACGACAGGCCACCU | 468 | ACGAGGUGGCCUGUCGU | 469 |
| | | CGUTT | | CCTT | |
| 115 | 115-133 | GACGACAGGCCACCUC | 470 | GACGAGGUGGCCUGUCG | 471 |
| | | GUCTT | | UCTT | |
| 116 | 116-134 | ACGACAGGCCACCUCG | 472 | CGACGAGGUGGCCUGUC | 473 |
| | | UCGTT | | GUTT | |
| 117 | 117-135 | CGACAGGCCACCUCGU | 474 | CCGACGAGGUGGCCUGU | 475 |
| | | CGGTT | | CGTT | |
| 118 | 118-136 | GACAGGCCACCUCGUC | 476 | GCCGACGAGGUGGCCUG | 477 |
| | | GGCTT | | UCTT | |
| 120 | 120-138 | CAGGCCACCUCGUCGG | 478 | ACGCCGACGAGGUGGCC | 479 |
| | | CGUTT | | UGTT | |
| 121 | 121-139 | AGGCCACCUCGUCGGC | 480 | GACGCCGACGAGGUGGC | 481 |
| | | GUCTT | | CUTT | |
| 122 | 122-140 | GGCCACCUCGUCGGCG | 482 | GGACGCCGACGAGGUGG | 483 |
| | | UCCTT | | CCTT | |
| 123 | 123-141 | GCCACCUCGUCGGCGU | 484 | CGGACGCCGACGAGGUG | 485 |
| | | CCGTT | | GCTT | |
| 124 | 124-142 | CCACCUCGUCGGCGUC | 486 | GCGGACGCCGACGAGGU | 487 |
| | | CGCTT | | GGTT | |
| 125 | 125-143 | CACCUCGUCGGCGUCC | 488 | GGCGGACGCCGACGAGG | 489 |
| | | GCCTT | | UGTT | |
| 126 | 126-144 | ACCUCGUCGGCGUCCG | 490 | GGGCGGACGCCGACGAG | 491 |
| | | CCCTT | | GUTT | |
| 127 | 127-145 | CCUCGUCGGCGUCCGC | 492 | CGGGCGGACGCCGACGA | 493 |
| | | CCGTT | | GGTT | |
| 128 | 128-146 | CUCGUCGGCGUCCGCC | 494 | UCGGGCGGACGCCGACG | 495 |
| | | CGATT | | AGTT | |
| 129 | 129-147 | UCGUCGGCGUCCGCCC | 496 | CUCGGGCGGACGCCGAC | 497 |
| | | GAGTT | | GATT | |
| 130 | 130-148 | CGUCGGCGUCCGCCCG | 498 | ACUCGGGCGGACGCCGA | 499 |
| | | AGUTT | | CGTT | |
| 131 | 131-149 | GUCGGCGUCCGCCCGA | 500 | GACUCGGGCGGACGCCG | 501 |
| | | GUCTT | | ACTT | |
| 132 | 132-150 | UCGGCGUCCGCCCGAG | 502 | GGACUCGGGCGGACGCC | 503 |
| | | UCCTT | | GATT | |
| 135 | 135-153 | GCGUCCGCCCGAGUCC | 504 | CGGGGACUCGGGCGGAC | 505 |
| | | CCGTT | | GCTT | |
| 136 | 136-154 | CGUCCGCCCGAGUCCC | 506 | GCGGGGACUCGGGCGGA | 507 |
| | | CGCTT | | CGTT | |
| 141 | 141-159 | GCCCGAGUCCCCGCCU | 508 | GCGAGGCGGGGACUCGG | 509 |
| | | CGCTT | | GCTT | |
| 164 | 164-182 | AACGCCACAACCACCG | 510 | GCGCGGUGGUUGUGGC | 511 |
| | | CGCTT | | GUUTT | |
| 165 | 165-183 | ACGCCACAACCACCGC | 512 | UGCGCGGUGGUUGUGG | 513 |
| | | GCATT | | CGUTT | |
| 166 | 166-184 | CGCCACAACCACCGCG | 514 | GUGCGCGGUGGUUGUG | 515 |
| | | CACTT | | GCGTT | |
| 168 | 168-186 | CCACAACCACCGCGCA | 516 | CCGUGCGCGGUGGUUGU | 517 |
| | | CGGTT | | GGTT | |
| 169 | 169-187 | CACAACCACCGCGCAC | 518 | GCCGUGCGCGGUGGUUG | 519 |
| | | GGCTT | | UGTT | |
| 170 | 170-188 | ACAACCACCGCGCACG | 520 | GGCCGUGCGCGGUGGUU | 521 |
| | | GCCTT | | GUTT | |
| 247 | 247-265 | AUGCGACCCUCCGGGA | 522 | CCGUCCCGGAGGGUCGC | 523 |
| | | CGGTT | | AUTT | |
| 248 | 248-266 | UGCGACCCUCCGGGAC | 524 | GCCGUCCCGGAGGGUCG | 525 |
| | | GGCTT | | CATT | |
| 249 | 249-267 | GCGACCCUCCGGGACG | 526 | GGCCGUCCCGGAGGGUC | 527 |
| | | GCCTT | | GCTT | |
| 251 | 251-269 | GACCCUCCGGGACGGC | 528 | CCGGCCGUCCCGGAGGG | 529 |
| | | CGGTT | | UCTT | |
| 252 | 252-270 | ACCCUCCGGGACGGCC | 530 | CCCGGCCGUCCCGGAGG | 531 |
| | | GGGTT | | GUTT | |
| 254 | 254-272 | CCUCCGGGACGGCCGG | 532 | GCCCCGGCCGUCCCGGA | 533 |
| | | GGCTT | | GGTT | |
| 329 | 329-347 | AGAAAGUUUGCCAAG | 534 | GUGCCUUGGCAAACUUU | 535 |
| | | GCACTT | | CUTT | |
| 330 | 330-348 | GAAAGUUUGCCAAGG | 536 | CGUGCCUUGGCAAACUU | 537 |
| | | CACGTT | | UCTT | |
| 332 | 332-350 | AAGUUUGCCAAGGCA | 538 | CUCGUGCCUUGGCAAAC | 539 |
| | | CGAGTT | | UUTT | |
| 333 | 333-351 | AGUUUGCCAAGGCAC | 540 | ACUCGUGCCUUGGCAAA | 541 |
| | | GAGUTT | | CUTT | |
| 334 | 334-352 | GUUUGCCAAGGCACG | 542 | UACUCGUGCCUUGGCAA | 543 |
| | | AGUATT | | ACTT | |
| 335 | 335-353 | UUUGCCAAGGCACGA | 544 | UUACUCGUGCCUUGGCA | 545 |
| | | GUAATT | | AATT | |
| 336 | 336-354 | UUGCCAAGGCACGAG | 546 | GUUACUCGUGCCUUGGC | 547 |
| | | UAACTT | | AATT | |
| 337 | 337-355 | UGCCAAGGCACGAGU | 548 | UGUUACUCGUGCCUUGG | 549 |
| | | AACATT | | CATT | |
| 338 | 338-356 | GCCAAGGCACGAGUA | 550 | UUGUUACUCGUGCCUUG | 551 |
| | | ACAATT | | GCTT | |
| 361 | 361-379 | ACGCAGUUGGGCACU | 552 | CAAAAGUGCCCAACUGC | 553 |
| | | UUUGTT | | GUTT | |
| 362 | 362-380 | CGCAGUUGGGCACUU | 554 | UCAAAAGUGCCCAACUG | 555 |
| | | UUGATT | | CGTT | |
| 363 | 363-381 | GCAGUUGGGCACUUU | 556 | UUCAAAAGUGCCCAACU | 557 |
| | | UGAATT | | GCTT | |
| 364 | 364-382 | CAGUUGGGCACUUUU | 558 | CUUCAAAAGUGCCCAAC | 559 |
| | | GAAGTT | | UGTT | |
| 365 | 365-383 | AGUUGGGCACUUUUG | 560 | UCUUCAAAAGUGCCCAA | 561 |
| | | AAGATT | | CUTT | |
| 366 | 366-384 | GUUGGGCACUUUUGA | 562 | AUCUUCAAAAGUGCCCA | 563 |
| | | AGAUTT | | ACTT | |
| 367 | 367-385 | UUGGGCACUUUUGAA | 564 | GAUCUUCAAAAGUGCCC | 565 |
| | | GAUCTT | | AATT | |
| 368 | 368-386 | UGGGCACUUUUGAAG | 566 | UGAUCUUCAAAAGUGCC | 567 |
| | | AUCATT | | CATT | |
| 369 | 369-387 | GGGCACUUUUGAAGA | 568 | AUGAUCUUCAAAAGUG | 569 |
| | | UCAUTT | | CCCTT | |
| 377 | 377-395 | UUGAAGAUCAUUUUC | 570 | CUGAGAAAAUGAUCUU | 571 |
| | | UCAGTT | | CAATT | |
| 379 | 379-397 | GAAGAUCAUUUUCUC | 572 | GGCUGAGAAAAUGAUC | 573 |
| | | AGCCTT | | UUCTT | |
| 380 | 380-398 | AAGAUCAUUUUCUCA | 574 | AGGCUGAGAAAAUGAU | 575 |
| | | GCCUTT | | CUUTT | |
| 385 | 385-403 | CAUUUUCUCAGCCUCC | 576 | UCUGGAGGCUGAGAAA | 577 |
| | | AGATT | | AUGTT | |
| 394 | 394-412 | AGCCUCCAGAGGAUG | 578 | UGAACAUCCUCUGGAGG | 579 |
| | | UUCATT | | CUTT | |
| 396 | 396-414 | CCUCCAGAGGAUGUUC | 580 | AUUGAACAUCCUCUGGA | 581 |
| | | AAUTT | | GGTT | |
| 397 | 397-415 | CUCCAGAGGAUGUUC | 582 | UAUUGAACAUCCUCUGG | 583 |
| | | AAUATT | | AGTT | |
| 401 | 401-419 | AGAGGAUGUUCAAUA | 584 | CAGUUAUUGAACAUCCU | 585 |
| | | ACUGTT | | CUTT | |
| 403 | 403-421 | AGGAUGUUCAAUAAC | 586 | CACAGUUAUUGAACAUC | 587 |
| | | UGUGTT | | CUTT | |
| 407 | 407-425 | UGUUCAAUAACUGUG | 588 | ACCUCACAGUUAUUGAA | 589 |
| | | AGGUTT | | CATT | |
| 409 | 409-427 | UUCAAUAACUGUGAG | 590 | CCACCUCACAGUUAUUG | 591 |
| | | GUGGTT | | AATT | |
| 410 | 410-428 | UCAAUAACUGUGAGG | 592 | ACCACCUCACAGUUAUU | 593 |
| | | UGGUTT | | GATT | |
| 411 | 411-429 | CAAUAACUGUGAGGU | 594 | GACCACCUCACAGUUAU | 595 |
| | | GGUCTT | | UGTT | |
| 412 | 412-430 | AAUAACUGUGAGGUG | 596 | GGACCACCUCACAGUUA | 597 |
| | | GUCCTT | | UUTT | |
| 413 | 413-431 | AUAACUGUGAGGUGG | 598 | AGGACCACCUCACAGUU | 599 |
| | | UCCUTT | | AUTT | |
| 414 | 414-432 | UAACUGUGAGGUGGU | 600 | AAGGACCACCUCACAGU | 601 |
| | | CCUUTT | | UATT | |
| 416 | 416-434 | ACUGUGAGGUGGUCC | 602 | CCAAGGACCACCUCACA | 603 |
| | | UUGGTT | | GUTT | |
| 418 | 418-436 | UGUGAGGUGGUCCUU | 604 | UCCCAAGGACCACCUCA | 605 |
| | | GGGATT | | CATT | |
| 419 | 419-437 | GUGAGGUGGUCCUUG | 606 | UUCCCAAGGACCACCUC | 607 |
| | | GGAATT | | ACTT | |
| 425 | 425-443 | UGGUCCUUGGGAAUU | 608 | UCCAAAUUCCCAAGGAC | 609 |
| | | UGGATT | | CATT | |
| 431 | 431-449 | UUGGGAAUUUGGAAA | 610 | GUAAUUUCCAAAUUCCC | 611 |
| | | UUACTT | | AATT | |
| 432 | 432-450 | UGGGAAUUUGGAAAU | 612 | GGUAAUUUCCAAAUUCC | 613 |
| | | UACCTT | | CATT | |
| 433 | 433-451 | GGGAAUUUGGAAAUU | 614 | AGGUAAUUUCCAAAUU | 615 |
| | | ACCUTT | | CCCTT | |
| 434 | 434-452 | GGAAUUUGGAAAUUA | 616 | UAGGUAAUUUCCAAAU | 617 |
| | | CCUATT | | UCCTT | |
| 458 | 458-476 | AGAGGAAUUAUGAUC | 618 | GAAAGAUCAUAAUUCC | 619 |
| | | UUUCTT | | UCUTT | |
| 459 | 459-477 | GAGGAAUUAUGAUCU | 620 | GGAAAGAUCAUAAUUC | 621 |
| | | UUCCTT | | CUCTT | |
| 463 | 463-481 | AAUUAUGAUCUUUCC | 622 | AGAAGGAAAGAUCAUA | 623 |
| | | UUCUTT | | AUUTT | |
| 464 | 464-482 | AUUAUGAUCUUUCCU | 624 | AAGAAGGAAAGAUCAU | 625 |
| | | UCUUTT | | AAUTT | |
| 466 | 466-484 | UAUGAUCUUUCCUUC | 626 | UUAAGAAGGAAAGAUC | 627 |
| | | UUAATT | | AUATT | |
| 468 | 468-486 | UGAUCUUUCCUUCUU | 628 | CUUUAAGAAGGAAAGA | 629 |
| | | AAAGTT | | UCATT | |
| 471 | 471-489 | UCUUUCCUUCUUAAA | 630 | GGUCUUUAAGAAGGAA | 631 |
| | | GACCTT | | AGATT | |
| 476 | 476-494 | CCUUCUUAAAGACCAU | 632 | UGGAUGGUCUUUAAGA | 633 |
| | | CCATT | | AGGTT | |
| 477 | 477-495 | CUUCUUAAAGACCAUC | 634 | CUGGAUGGUCUUUAAG | 635 |
| | | CAGTT | | AAGTT | |
| 479 | 479-497 | UCUUAAAGACCAUCCA | 636 | UCCUGGAUGGUCUUUA | 637 |
| | | GGATT | | AGATT | |
| 481 | 481-499 | UUAAAGACCAUCCAG | 638 | CCUCCUGGAUGGUCUUU | 639 |
| | | GAGGTT | | AATT | |
| 482 | 482-500 | UAAAGACCAUCCAGG | 640 | ACCUCCUGGAUGGUCUU | 641 |
| | | AGGUTT | | UATT | |
| 492 | 492-510 | CCAGGAGGUGGCUGG | 642 | AUAACCAGCCACCUCCU | 643 |
| | | UUAUTT | | GGTT | |
| 493 | 493-511 | CAGGAGGUGGCUGGU | 644 | CAUAACCAGCCACCUCC | 645 |
| | | UAUGTT | | UGTT | |
| 494 | 494-512 | AGGAGGUGGCUGGUU | 646 | ACAUAACCAGCCACCUC | 647 |
| | | AUGUTT | | CUTT | |
| 495 | 495-513 | GGAGGUGGCUGGUUA | 648 | GACAUAACCAGCCACCU | 649 |
| | | UGUCTT | | CCTT | |
| 496 | 496-514 | GAGGUGGCUGGUUAU | 650 | GGACAUAACCAGCCACC | 651 |
| | | GUCCTT | | UCTT | |
| 497 | 497-515 | AGGUGGCUGGUUAUG | 652 | AGGACAUAACCAGCCAC | 653 |
| | | UCCUTT | | CUTT | |
| 499 | 499-517 | GUGGCUGGUUAUGUC | 654 | UGAGGACAUAACCAGCC | 655 |
| | | CUCATT | | ACTT | |
| 520 | 520-538 | GCCCUCAACACAGUGG | 656 | GCUCCACUGUGUUGAGG | 657 |
| | | AGCTT | | GCTT | |
| 542 | 542-560 | UUCCUUUGGAAAACC | 658 | UGCAGGUUUUCCAAAG | 659 |
| | | UGCATT | | GAATT | |
| 543 | 543-561 | UCCUUUGGAAAACCU | 660 | CUGCAGGUUUUCCAAAG | 661 |
| | | GCAGTT | | GATT | |
| 550 | 550-568 | GAAAACCUGCAGAUC | 662 | UGAUGAUCUGCAGGUU | 663 |
| | | AUCATT | | UUCTT | |
| 551 | 551-569 | AAAACCUGCAGAUCA | 664 | CUGAUGAUCUGCAGGU | 665 |
| | | UCAGTT | | UUUTT | |
| 553 | 553-571 | AACCUGCAGAUCAUCA | 666 | CUCUGAUGAUCUGCAGG | 667 |
| | | GAGTT | | UUTT | |
| 556 | 556-574 | CUGCAGAUCAUCAGA | 668 | UUCCUCUGAUGAUCUGC | 669 |
| | | GGAATT | | AGTT | |
| 586 | 586-604 | GAAAAUUCCUAUGCC | 670 | CUAAGGCAUAGGAAUU | 671 |
| | | UUAGTT | | UUCTT | |
| 587 | 587-605 | AAAAUUCCUAUGCCU | 672 | GCUAAGGCAUAGGAAU | 673 |
| | | UAGCTT | | UUUTT | |
| 589 | 589-607 | AAUUCCUAUGCCUUA | 674 | CUGCUAAGGCAUAGGA | 675 |
| | | GCAGTT | | AUUTT | |
| 592 | 592-610 | UCCUAUGCCUUAGCAG | 676 | AGACUGCUAAGGCAUA | 677 |
| | | UCUTT | | GGATT | |
| 593 | 593-611 | CCUAUGCCUUAGCAGU | 678 | AAGACUGCUAAGGCAU | 679 |
| | | CUUTT | | AGGTT | |
| 594 | 594-612 | CUAUGCCUUAGCAGUC | 680 | UAAGACUGCUAAGGCA | 681 |
| | | UUATT | | UAGTT | |
| 596 | 596-614 | AUGCCUUAGCAGUCU | 682 | GAUAAGACUGCUAAGG | 683 |
| | | UAUCTT | | CAUTT | |
| 597 | 597-615 | UGCCUUAGCAGUCUU | 684 | AGAUAAGACUGCUAAG | 685 |
| | | AUCUTT | | GCATT | |
| 598 | 598-616 | GCCUUAGCAGUCUUA | 686 | UAGAUAAGACUGCUAA | 687 |
| | | UCUATT | | GGCTT | |
| 599 | 599-617 | CCUUAGCAGUCUUAUC | 688 | UUAGAUAAGACUGCUA | 689 |
| | | UAATT | | AGGTT | |
| 600 | 600-618 | CUUAGCAGUCUUAUC | 690 | GUUAGAUAAGACUGCU | 691 |
| | | UAACTT | | AAGTT | |
| 601 | 601-619 | UUAGCAGUCUUAUCU | 692 | AGUUAGAUAAGACUGC | 693 |
| | | AACUTT | | UAATT | |
| 602 | 602-620 | UAGCAGUCUUAUCUA | 694 | UAGUUAGAUAAGACUG | 695 |
| | | ACUATT | | CUATT | |
| 603 | 603-621 | AGCAGUCUUAUCUAA | 696 | AUAGUUAGAUAAGACU | 697 |
| | | CUAUTT | | GCUTT | |
| 604 | 604-622 | GCAGUCUUAUCUAAC | 698 | CAUAGUUAGAUAAGAC | 699 |
| | | UAUGTT | | UGCTT | |
| 605 | 605-623 | CAGUCUUAUCUAACU | 700 | UCAUAGUUAGAUAAGA | 701 |
| | | AUGATT | | CUGTT | |
| 608 | 608-626 | UCUUAUCUAACUAUG | 702 | GCAUCAUAGUUAGAUA | 703 |
| | | AUGCTT | | AGATT | |
| 609 | 609-627 | CUUAUCUAACUAUGA | 704 | UGCAUCAUAGUUAGAU | 705 |
| | | UGCATT | | AAGTT | |
| 610 | 610-628 | UUAUCUAACUAUGAU | 706 | UUGCAUCAUAGUUAGA | 707 |
| | | GCAATT | | UAATT | |
| 611 | 611-629 | UAUCUAACUAUGAUG | 708 | UUUGCAUCAUAGUUAG | 709 |
| | | CAAATT | | AUATT | |
| 612 | 612-630 | AUCUAACUAUGAUGC | 710 | AUUUGCAUCAUAGUUA | 711 |
| | | AAAUTT | | GAUTT | |
| 613 | 613-631 | UCUAACUAUGAUGCA | 712 | UAUUUGCAUCAUAGUU | 713 |
| | | AAUATT | | AGATT | |
| 614 | 614-632 | CUAACUAUGAUGCAA | 714 | UUAUUUGCAUCAUAGU | 715 |
| | | AUAATT | | UAGTT | |
| 616 | 616-634 | AACUAUGAUGCAAAU | 716 | UUUUAUUUGCAUCAUA | 717 |
| | | AAAATT | | GUUTT | |
| 622 | 622-640 | GAUGCAAAUAAAACC | 718 | GUCCGGUUUUAUUUGC | 719 |
| | | GGACTT | | AUCTT | |
| 623 | 623-641 | AUGCAAAUAAAACCG | 720 | AGUCCGGUUUUAUUUG | 721 |
| | | GACUTT | | CAUTT | |
| 624 | 624-642 | UGCAAAUAAAACCGG | 722 | CAGUCCGGUUUUAUUU | 723 |
| | | ACUGTT | | GCATT | |
| 626 | 626-644 | CAAAUAAAACCGGAC | 724 | UUCAGUCCGGUUUUAU | 725 |
| | | UGAATT | | UUGTT | |
| 627 | 627-645 | AAAUAAAACCGGACU | 726 | CUUCAGUCCGGUUUUAU | 727 |
| | | GAAGTT | | UUTT | |
| 628 | 628-646 | AAUAAAACCGGACUG | 728 | CCUUCAGUCCGGUUUUA | 729 |
| | | AAGGTT | | UUTT | |
| 630 | 630-648 | UAAAACCGGACUGAA | 730 | CUCCUUCAGUCCGGUUU | 731 |
| | | GGAGTT | | UATT | |
| 631 | 631-649 | AAAACCGGACUGAAG | 732 | GCUCCUUCAGUCCGGUU | 733 |
| | | GAGCTT | | UUTT | |
| 632 | 632-650 | AAACCGGACUGAAGG | 734 | AGCUCCUUCAGUCCGGU | 735 |
| | | AGCUTT | | UUTT | |
| 633 | 633-651 | AACCGGACUGAAGGA | 736 | CAGCUCCUUCAGUCCGG | 737 |
| | | GCUGTT | | UUTT | |
| 644 | 644-662 | AGGAGCUGCCCAUGA | 738 | UUUCUCAUGGGCAGCUC | 739 |
| | | GAAATT | | CUTT | |
| 665 | 665-683 | UACAGGAAAUCCUGC | 740 | CCAUGCAGGAUUUCCUG | 741 |
| | | AUGGTT | | UATT | |
| 668 | 668-686 | AGGAAAUCCUGCAUG | 742 | GCGCCAUGCAGGAUUUC | 743 |
| | | GCGCTT | | CUTT | |
| 669 | 669-687 | GGAAAUCCUGCAUGG | 744 | GGCGCCAUGCAGGAUUU | 745 |
| | | CGCCTT | | CCTT | |
| 670 | 670-688 | GAAAUCCUGCAUGGC | 746 | CGGCGCCAUGCAGGAUU | 747 |
| | | GCCGTT | | UCTT | |
| 671 | 671-689 | AAAUCCUGCAUGGCGC | 748 | ACGGCGCCAUGCAGGAU | 749 |
| | | CGUTT | | UUTT | |
| 672 | 672-690 | AAUCCUGCAUGGCGCC | 750 | CACGGCGCCAUGCAGGA | 751 |
| | | GUGTT | | UUTT | |
| 674 | 674-692 | UCCUGCAUGGCGCCGU | 752 | CGCACGGCGCCAUGCAG | 753 |
| | | GCGTT | | GATT | |
| 676 | 676-694 | CUGCAUGGCGCCGUGC | 754 | ACCGCACGGCGCCAUGC | 755 |
| | | GGUTT | | AGTT | |
| 677 | 677-695 | UGCAUGGCGCCGUGCG | 756 | AACCGCACGGCGCCAUG | 757 |
| | | GUUTT | | CATT | |
| 678 | 678-696 | GCAUGGCGCCGUGCGG | 758 | GAACCGCACGGCGCCAU | 759 |
| | | UUCTT | | GCTT | |
| 680 | 680-698 | AUGGCGCCGUGCGGU | 760 | CUGAACCGCACGGCGCC | 761 |
| | | UCAGTT | | AUTT | |
| 681 | 681-699 | UGGCGCCGUGCGGUUC | 762 | GCUGAACCGCACGGCGC | 763 |
| | | AGCTT | | CATT | |
| 682 | 682-700 | GGCGCCGUGCGGUUCA | 764 | UGCUGAACCGCACGGCG | 765 |
| | | GCATT | | CCTT | |
| 683 | 683-701 | GCGCCGUGCGGUUCAG | 766 | UUGCUGAACCGCACGGC | 767 |
| | | CAATT | | GCTT | |
| 684 | 684-702 | CGCCGUGCGGUUCAGC | 768 | GUUGCUGAACCGCACGG | 769 |
| | | AACTT | | CGTT | |
| 685 | 685-703 | GCCGUGCGGUUCAGCA | 770 | UGUUGCUGAACCGCACG | 771 |
| | | ACATT | | GCTT | |
| 686 | 686-704 | CCGUGCGGUUCAGCAA | 772 | UUGUUGCUGAACCGCAC | 773 |
| | | CAATT | | GGTT | |
| 688 | 688-706 | GUGCGGUUCAGCAAC | 774 | GGUUGUUGCUGAACCGC | 775 |
| | | AACCTT | | ACTT | |
| 690 | 690-708 | GCGGUUCAGCAACAAC | 776 | AGGGUUGUUGCUGAAC | 777 |
| | | CCUTT | | CGCTT | |
| 692 | 692-710 | GGUUCAGCAACAACCC | 778 | GCAGGGUUGUUGCUGA | 779 |
| | | UGCTT | | ACCTT | |
| 698 | 698-716 | GCAACAACCCUGCCCU | 780 | CACAGGGCAGGGUUGU | 781 |
| | | GUGTT | | UGCTT | |
| 700 | 700-718 | AACAACCCUGCCCUGU | 782 | UGCACAGGGCAGGGUU | 783 |
| | | GCATT | | GUUTT | |
| 719 | 719-737 | ACGUGGAGAGCAUCC | 784 | CACUGGAUGCUCUCCAC | 785 |
| | | AGUGTT | | GUTT | |
| 720 | 720-738 | CGUGGAGAGCAUCCA | 786 | CCACUGGAUGCUCUCCA | 787 |
| | | GUGGTT | | CGTT | |
| 721 | 721-739 | GUGGAGAGCAUCCAG | 788 | GCCACUGGAUGCUCUCC | 789 |
| | | UGGCTT | | ACTT | |
| 724 | 724-742 | GAGAGCAUCCAGUGG | 790 | CCCGCCACUGGAUGCUC | 791 |
| | | CGGGTT | | UCTT | |
| 725 | 725-743 | AGAGCAUCCAGUGGC | 792 | UCCCGCCACUGGAUGCU | 793 |
| | | GGGATT | | CUTT | |
| 726 | 726-744 | GAGCAUCCAGUGGCG | 794 | GUCCCGCCACUGGAUGC | 795 |
| | | GGACTT | | UCTT | |
| 733 | 733-751 | CAGUGGCGGGACAUA | 796 | UGACUAUGUCCCGCCAC | 797 |
| | | GUCATT | | UGTT | |
| 734 | 734-752 | AGUGGCGGGACAUAG | 798 | CUGACUAUGUCCCGCCA | 799 |
| | | UCAGTT | | CUTT | |
| 736 | 736-754 | UGGCGGGACAUAGUC | 800 | UGCUGACUAUGUCCCGC | 801 |
| | | AGCATT | | CATT | |
| 737 | 737-755 | GGCGGGACAUAGUCA | 802 | CUGCUGACUAUGUCCCG | 803 |
| | | GCAGTT | | CCTT | |
| 763 | 763-781 | CUCAGCAACAUGUCGA | 804 | CCAUCGACAUGUUGCUG | 805 |
| | | UGGTT | | AGTT | |
| 765 | 765-783 | CAGCAACAUGUCGAU | 806 | GUCCAUCGACAUGUUGC | 807 |
| | | GGACTT | | UGTT | |
| 766 | 766-784 | AGCAACAUGUCGAUG | 808 | AGUCCAUCGACAUGUUG | 809 |
| | | GACUTT | | CUTT | |
| 767 | 767-785 | GCAACAUGUCGAUGG | 810 | AAGUCCAUCGACAUGUU | 811 |
| | | ACUUTT | | GCTT | |
| 769 | 769-787 | AACAUGUCGAUGGAC | 812 | GGAAGUCCAUCGACAUG | 813 |
| | | UUCCTT | | UUTT | |
| 770 | 770-788 | ACAUGUCGAUGGACU | 814 | UGGAAGUCCAUCGACAU | 815 |
| | | UCCATT | | GUTT | |
| 771 | 771-789 | CAUGUCGAUGGACUU | 816 | CUGGAAGUCCAUCGACA | 817 |
| | | CCAGTT | | UGTT | |
| 772 | 772-790 | AUGUCGAUGGACUUC | 818 | UCUGGAAGUCCAUCGAC | 819 |
| | | CAGATT | | AUTT | |
| 775 | 775-793 | UCGAUGGACUUCCAG | 820 | GGUUCUGGAAGUCCAUC | 821 |
| | | AACCTT | | GATT | |
| 789 | 789-807 | GAACCACCUGGGCAGC | 822 | GCAGCUGCCCAGGUGGU | 823 |
| | | UGCTT | | UCTT | |
| 798 | 798-816 | GGGCAGCUGCCAAAA | 824 | ACACUUUUGGCAGCUGC | 825 |
| | | GUGUTT | | CCTT | |
| 800 | 800-818 | GCAGCUGCCAAAAGU | 826 | UCACACUUUUGGCAGCU | 827 |
| | | GUGATT | | GCTT | |
| 805 | 805-823 | UGCCAAAAGUGUGAU | 828 | UUGGAUCACACUUUUG | 829 |
| | | CCAATT | | GCATT | |
| 806 | 806-824 | GCCAAAAGUGUGAUC | 830 | CUUGGAUCACACUUUUG | 831 |
| | | CAAGTT | | GCTT | |
| 807 | 807-825 | CCAAAAGUGUGAUCC | 832 | GCUUGGAUCACACUUUU | 833 |
| | | AAGCTT | | GGTT | |
| 810 | 810-828 | AAAGUGUGAUCCAAG | 834 | ACAGCUUGGAUCACACU | 835 |
| | | CUGUTT | | UUTT | |
| 814 | 814-832 | UGUGAUCCAAGCUGU | 836 | UGGGACAGCUUGGAUC | 837 |
| | | CCCATT | | ACATT | |
| 815 | 815-833 | GUGAUCCAAGCUGUCC | 838 | UUGGGACAGCUUGGAU | 839 |
| | | CAATT | | CACTT | |
| 817 | 817-835 | GAUCCAAGCUGUCCCA | 840 | CAUUGGGACAGCUUGG | 841 |
| | | AUGTT | | AUCTT | |
| 818 | 818-836 | AUCCAAGCUGUCCCAA | 842 | CCAUUGGGACAGCUUGG | 843 |
| | | UGGTT | | AUTT | |
| 819 | 819-837 | UCCAAGCUGUCCCAAU | 844 | CCCAUUGGGACAGCUUG | 845 |
| | | GGGTT | | GATT | |
| 820 | 820-838 | CCAAGCUGUCCCAAUG | 846 | UCCCAUUGGGACAGCUU | 847 |
| | | GGATT | | GGTT | |
| 821 | 821-839 | CAAGCUGUCCCAAUGG | 848 | CUCCCAUUGGGACAGCU | 849 |
| | | GAGTT | | UGTT | |
| 823 | 823-841 | AGCUGUCCCAAUGGG | 850 | AGCUCCCAUUGGGACAG | 851 |
| | | AGCUTT | | CUTT | |
| 826 | 826-844 | UGUCCCAAUGGGAGC | 852 | AGCAGCUCCCAUUGGGA | 853 |
| | | UGCUTT | | CATT | |
| 847 | 847-865 | GGUGCAGGAGAGGAG | 854 | AGUUCUCCUCUCCUGCA | 855 |
| | | AACUTT | | CCTT | |
| 871 | 871-889 | AAACUGACCAAAAUC | 856 | AGAUGAUUUUGGUCAG | 857 |
| | | AUCUTT | | UUUTT | |
| 872 | 872-890 | AACUGACCAAAAUCA | 858 | CAGAUGAUUUUGGUCA | 859 |
| | | UCUGTT | | GUUTT | |
| 873 | 873-891 | ACUGACCAAAAUCAUC | 860 | ACAGAUGAUUUUGGUC | 861 |
| | | UGUTT | | AGUTT | |
| 877 | 877-895 | ACCAAAAUCAUCUGU | 862 | GGGCACAGAUGAUUUU | 863 |
| | | GCCCTT | | GGUTT | |
| 878 | 878-896 | CCAAAAUCAUCUGUGC | 864 | UGGGCACAGAUGAUUU | 865 |
| | | CCATT | | UGGTT | |
| 881 | 881-899 | AAAUCAUCUGUGCCCA | 866 | UGCUGGGCACAGAUGA | 867 |
| | | GCATT | | UUUTT | |
| 890 | 890-908 | GUGCCCAGCAGUGCUC | 868 | CCGGAGCACUGCUGGGC | 869 |
| | | CGGTT | | ACTT | |
| 892 | 892-910 | GCCCAGCAGUGCUCCG | 870 | GCCCGGAGCACUGCUGG | 871 |
| | | GGCTT | | GCTT | |
| 929 | 929-947 | CCAGUGACUGCUGCCA | 872 | UUGUGGCAGCAGUCACU | 873 |
| | | CAATT | | GGTT | |
| 930 | 930-948 | CAGUGACUGCUGCCAC | 874 | GUUGUGGCAGCAGUCAC | 875 |
| | | AACTT | | UGTT | |
| 979 | 979-997 | GAGAGCGACUGCCUG | 876 | AGACCAGGCAGUCGCUC | 877 |
| | | GUCUTT | | UCTT | |
| 980 | 980-998 | AGAGCGACUGCCUGG | 878 | CAGACCAGGCAGUCGCU | 879 |
| | | UCUGTT | | CUTT | |
| 981 | 981-999 | GAGCGACUGCCUGGUC | 880 | GCAGACCAGGCAGUCGC | 881 |
| | | UGCTT | | UCTT | |
| 982 | 982-1000 | AGCGACUGCCUGGUCU | 882 | GGCAGACCAGGCAGUCG | 883 |
| | | GCCTT | | CUTT | |
| 983 | 983-1001 | GCGACUGCCUGGUCUG | 884 | CGGCAGACCAGGCAGUC | 885 |
| | | CCGTT | | GCTT | |
| 984 | 984-1002 | CGACUGCCUGGUCUGC | 886 | GCGGCAGACCAGGCAGU | 887 |
| | | CGCTT | | CGTT | |
| 989 | 989-1007 | GCCUGGUCUGCCGCAA | 888 | AAUUUGCGGCAGACCAG | 889 |
| | | AUUTT | | GCTT | |
| 990 | 990-1008 | CCUGGUCUGCCGCAAA | 890 | GAAUUUGCGGCAGACCA | 891 |
| | | UUCTT | | GGTT | |
| 991 | 991-1009 | CUGGUCUGCCGCAAAU | 892 | GGAAUUUGCGGCAGACC | 893 |
| | | UCCTT | | AGTT | |
| 992 | 992-1010 | UGGUCUGCCGCAAAU | 894 | CGGAAUUUGCGGCAGAC | 895 |
| | | UCCGTT | | CATT | |
| 994 | 994-1012 | GUCUGCCGCAAAUUCC | 896 | CUCGGAAUUUGCGGCAG | 897 |
| | | GAGTT | | ACTT | |
| 995 | 995-1013 | UCUGCCGCAAAUUCCG | 898 | UCUCGGAAUUUGCGGCA | 899 |
| | | AGATT | | GATT | |
| 996 | 996-1014 | CUGCCGCAAAUUCCGA | 900 | GUCUCGGAAUUUGCGGC | 901 |
| | | GACTT | | AGTT | |
| 997 | 997-1015 | UGCCGCAAAUUCCGAG | 902 | CGUCUCGGAAUUUGCGG | 903 |
| | | ACGTT | | CATT | |
| 999 | 999-1017 | CCGCAAAUUCCGAGAC | 904 | UUCGUCUCGGAAUUUGC | 905 |
| | | GAATT | | GGTT | |
| 1004 | 1004-1022 | AAUUCCGAGACGAAG | 906 | GUGGCUUCGUCUCGGAA | 907 |
| | | CCACTT | | UUTT | |
| 1005 | 1005-1023 | AUUCCGAGACGAAGCC | 908 | CGUGGCUUCGUCUCGGA | 909 |
| | | ACGTT | | AUTT | |
| 1006 | 1006-1024 | UUCCGAGACGAAGCCA | 910 | ACGUGGCUUCGUCUCGG | 911 |
| | | CGUTT | | AATT | |
| 1007 | 1007-1025 | UCCGAGACGAAGCCAC | 912 | CACGUGGCUUCGUCUCG | 913 |
| | | GUGTT | | GATT | |
| 1008 | 1008-1026 | CCGAGACGAAGCCACG | 914 | GCACGUGGCUUCGUCUC | 915 |
| | | UGCTT | | GGTT | |
| 1010 | 1010-1028 | GAGACGAAGCCACGU | 916 | UUGCACGUGGCUUCGUC | 917 |
| | | GCAATT | | UCTT | |
| 1013 | 1013-1031 | ACGAAGCCACGUGCAA | 918 | UCCUUGCACGUGGCUUC | 919 |
| | | GGATT | | GUTT | |
| 1014 | 1014-1032 | CGAAGCCACGUGCAAG | 920 | GUCCUUGCACGUGGCUU | 921 |
| | | GACTT | | CGTT | |
| 1015 | 1015-1033 | GAAGCCACGUGCAAG | 922 | UGUCCUUGCACGUGGCU | 923 |
| | | GACATT | | UCTT | |
| 1016 | 1016-1034 | AAGCCACGUGCAAGG | 924 | GUGUCCUUGCACGUGGC | 925 |
| | | ACACTT | | UUTT | |
| 1040 | 1040-1058 | CCCCACUCAUGCUCUA | 926 | UUGUAGAGCAUGAGUG | 927 |
| | | CAATT | | GGGTT | |
| 1042 | 1042-1060 | CCACUCAUGCUCUACA | 928 | GGUUGUAGAGCAUGAG | 929 |
| | | ACCTT | | UGGTT | |
| 1044 | 1044-1062 | ACUCAUGCUCUACAAC | 930 | GGGGUUGUAGAGCAUG | 931 |
| | | CCCTT | | AGUTT | |
| 1047 | 1047-1065 | CAUGCUCUACAACCCC | 932 | GGUGGGGUUGUAGAGC | 933 |
| | | ACCTT | | AUGTT | |
| 1071 | 1071-1089 | CCAGAUGGAUGUGAA | 934 | GGGGUUCACAUCCAUCU | 935 |
| | | CCCCTT | | GGTT | |
| 1073 | 1073-1091 | AGAUGGAUGUGAACC | 936 | UCGGGGUUCACAUCCAU | 937 |
| | | CCGATT | | CUTT | |
| 1074 | 1074-1092 | GAUGGAUGUGAACCC | 938 | CUCGGGGUUCACAUCCA | 939 |
| | | CGAGTT | | UCTT | |
| 1075 | 1075-1093 | AUGGAUGUGAACCCC | 940 | CCUCGGGGUUCACAUCC | 941 |
| | | GAGGTT | | AUTT | |
| 1077 | 1077-1095 | GGAUGUGAACCCCGA | 942 | GCCCUCGGGGUUCACAU | 943 |
| | | GGGCTT | | CCTT | |
| 1078 | 1078-1096 | GAUGUGAACCCCGAG | 944 | UGCCCUCGGGGUUCACA | 945 |
| | | GGCATT | | UCTT | |
| 1080 | 1080-1098 | UGUGAACCCCGAGGGC | 946 | UUUGCCCUCGGGGUUCA | 947 |
| | | AAATT | | CATT | |
| 1084 | 1084-1102 | AACCCCGAGGGCAAAU | 948 | UGUAUUUGCCCUCGGGG | 949 |
| | | ACATT | | UUTT | |
| 1085 | 1085-1103 | ACCCCGAGGGCAAAUA | 950 | CUGUAUUUGCCCUCGGG | 951 |
| | | CAGTT | | GUTT | |
| 1087 | 1087-1105 | CCCGAGGGCAAAUACA | 952 | AGCUGUAUUUGCCCUCG | 953 |
| | | GCUTT | | GGTT | |
| 1088 | 1088-1106 | CCGAGGGCAAAUACA | 954 | AAGCUGUAUUUGCCCUC | 955 |
| | | GCUUTT | | GGTT | |
| 1089 | 1089-1107 | CGAGGGCAAAUACAG | 956 | AAAGCUGUAUUUGCCCU | 957 |
| | | CUUUTT | | CGTT | |
| 1096 | 1096-1114 | AAAUACAGCUUUGGU | 958 | UGGCACCAAAGCUGUAU | 959 |
| | | GCCATT | | UUTT | |
| 1097 | 1097-1115 | AAUACAGCUUUGGUG | 960 | GUGGCACCAAAGCUGUA | 961 |
| | | CCACTT | | UUTT | |
| 1098 | 1098-1116 | AUACAGCUUUGGUGC | 962 | GGUGGCACCAAAGCUGU | 963 |
| | | CACCTT | | AUTT | |
| 1104 | 1104-1122 | CUUUGGUGCCACCUGC | 964 | CACGCAGGUGGCACCAA | 965 |
| | | GUGTT | | AGTT | |
| 1106 | 1106-1124 | UUGGUGCCACCUGCGU | 966 | UUCACGCAGGUGGCACC | 967 |
| | | GAATT | | AATT | |
| 1112 | 1112-1130 | CCACCUGCGUGAAGAA | 968 | CACUUCUUCACGCAGGU | 969 |
| | | GUGTT | | GGTT | |
| 1116 | 1116-1134 | CUGCGUGAAGAAGUG | 970 | GGGACACUUCUUCACGC | 971 |
| | | UCCCTT | | AGTT | |
| 1117 | 1117-1135 | UGCGUGAAGAAGUGU | 972 | GGGGACACUUCUUCACG | 973 |
| | | CCCCTT | | CATT | |
| 1118 | 1118-1136 | GCGUGAAGAAGUGUC | 974 | CGGGGACACUUCUUCAC | 975 |
| | | CCCGTT | | GCTT | |
| 1119 | 1119-1137 | CGUGAAGAAGUGUCC | 976 | ACGGGGACACUUCUUCA | 977 |
| | | CCGUTT | | CGTT | |
| 1120 | 1120-1138 | GUGAAGAAGUGUCCC | 978 | UACGGGGACACUUCUUC | 979 |
| | | CGUATT | | ACTT | |
| 1121 | 1121-1139 | UGAAGAAGUGUCCCC | 980 | UUACGGGGACACUUCUU | 981 |
| | | GUAATT | | CATT | |
| 1122 | 1122-1140 | GAAGAAGUGUCCCCG | 982 | AUUACGGGGACACUUCU | 983 |
| | | UAAUTT | | UCTT | |
| 1123 | 1123-1141 | AAGAAGUGUCCCCGU | 984 | AAUUACGGGGACACUUC | 985 |
| | | AAUUTT | | UUTT | |
| 1124 | 1124-1142 | AGAAGUGUCCCCGUA | 986 | UAAUUACGGGGACACU | 987 |
| | | AUUATT | | UCUTT | |
| 1125 | 1125-1143 | GAAGUGUCCCCGUAA | 988 | AUAAUUACGGGGACAC | 989 |
| | | UUAUTT | | UUCTT | |
| 1126 | 1126-1144 | AAGUGUCCCCGUAAU | 990 | CAUAAUUACGGGGACAC | 991 |
| | | UAUGTT | | UUTT | |
| 1127 | 1127-1145 | AGUGUCCCCGUAAUU | 992 | ACAUAAUUACGGGGAC | 993 |
| | | AUGUTT | | ACUTT | |
| 1128 | 1128-1146 | GUGUCCCCGUAAUUA | 994 | CACAUAAUUACGGGGAC | 995 |
| | | UGUGTT | | ACTT | |
| 1129 | 1129-1147 | UGUCCCCGUAAUUAU | 996 | CCACAUAAUUACGGGGA | 997 |
| | | GUGGTT | | CATT | |
| 1130 | 1130-1148 | GUCCCCGUAAUUAUG | 998 | ACCACAUAAUUACGGGG | 999 |
| | | UGGUTT | | ACTT | |
| 1132 | 1132-1150 | CCCCGUAAUUAUGUG | 1000 | UCACCACAUAAUUACGG | 1001 |
| | | GUGATT | | GGTT | |
| 1134 | 1134-1152 | CCGUAAUUAUGUGGU | 1002 | UGUCACCACAUAAUUAC | 1003 |
| | | GACATT | | GGTT | |
| 1136 | 1136-1154 | GUAAUUAUGUGGUGA | 1004 | UCUGUCACCACAUAAUU | 1005 |
| | | CAGATT | | ACTT | |
| 1137 | 1137-1155 | UAAUUAUGUGGUGAC | 1006 | AUCUGUCACCACAUAAU | 1007 |
| | | AGAUTT | | UATT | |
| 1138 | 1138-1156 | AAUUAUGUGGUGACA | 1008 | GAUCUGUCACCACAUAA | 1009 |
| | | GAUCTT | | UUTT | |
| 1139 | 1139-1157 | AUUAUGUGGUGACAG | 1010 | UGAUCUGUCACCACAUA | 1011 |
| | | AUCATT | | AUTT | |
| 1140 | 1140-1158 | UUAUGUGGUGACAGA | 1012 | GUGAUCUGUCACCACAU | 1013 |
| | | UCACTT | | AATT | |
| 1142 | 1142-1160 | AUGUGGUGACAGAUC | 1014 | CCGUGAUCUGUCACCAC | 1015 |
| | | ACGGTT | | AUTT | |
| 1145 | 1145-1163 | UGGUGACAGAUCACG | 1016 | GAGCCGUGAUCUGUCAC | 1017 |
| | | GCUCTT | | CATT | |
| 1147 | 1147-1165 | GUGACAGAUCACGGC | 1018 | ACGAGCCGUGAUCUGUC | 1019 |
| | | UCGUTT | | ACTT | |
| 1148 | 1148-1166 | UGACAGAUCACGGCUC | 1020 | CACGAGCCGUGAUCUGU | 1021 |
| | | GUGTT | | CATT | |
| 1149 | 1149-1167 | GACAGAUCACGGCUCG | 1022 | GCACGAGCCGUGAUCUG | 1023 |
| | | UGCTT | | UCTT | |
| 1150 | 1150-1168 | ACAGAUCACGGCUCGU | 1024 | CGCACGAGCCGUGAUCU | 1025 |
| | | GCGTT | | GUTT | |
| 1151 | 1151-1169 | CAGAUCACGGCUCGUG | 1026 | ACGCACGAGCCGUGAUC | 1027 |
| | | CGUTT | | UGTT | |
| 1152 | 1152-1170 | AGAUCACGGCUCGUGC | 1028 | GACGCACGAGCCGUGAU | 1029 |
| | | GUCTT | | CUTT | |
| 1153 | 1153-1171 | GAUCACGGCUCGUGCG | 1030 | GGACGCACGAGCCGUGA | 1031 |
| | | UCCTT | | UCTT | |
| 1154 | 1154-1172 | AUCACGGCUCGUGCGU | 1032 | CGGACGCACGAGCCGUG | 1033 |
| | | CCGTT | | AUTT | |
| 1155 | 1155-1173 | UCACGGCUCGUGCGUC | 1034 | UCGGACGCACGAGCCGU | 1035 |
| | | CGATT | | GATT | |
| 1156 | 1156-1174 | CACGGCUCGUGCGUCC | 1036 | CUCGGACGCACGAGCCG | 1037 |
| | | GAGTT | | UGTT | |
| 1157 | 1157-1175 | ACGGCUCGUGCGUCCG | 1038 | GCUCGGACGCACGAGCC | 1039 |
| | | AGCTT | | GUTT | |
| 1160 | 1160-1178 | GCUCGUGCGUCCGAGC | 1040 | CAGGCUCGGACGCACGA | 1041 |
| | | CUGTT | | GCTT | |
| 1200 | 1200-1218 | GGAGGAAGACGGCGU | 1042 | GCGGACGCCGUCUUCCU | 1043 |
| | | CCGCTT | | CCTT | |
| 1201 | 1201-1219 | GAGGAAGACGGCGUC | 1044 | UGCGGACGCCGUCUUCC | 1045 |
| | | CGCATT | | UCTT | |
| 1203 | 1203-1221 | GGAAGACGGCGUCCGC | 1046 | CUUGCGGACGCCGUCUU | 1047 |
| | | AAGTT | | CCTT | |
| 1204 | 1204-1222 | GAAGACGGCGUCCGCA | 1048 | ACUUGCGGACGCCGUCU | 1049 |
| | | AGUTT | | UCTT | |
| 1205 | 1205-1223 | AAGACGGCGUCCGCAA | 1050 | CACUUGCGGACGCCGUC | 1051 |
| | | GUGTT | | UUTT | |
| 1207 | 1207-1225 | GACGGCGUCCGCAAGU | 1052 | UACACUUGCGGACGCCG | 1053 |
| | | GUATT | | UCTT | |
| 1208 | 1208-1226 | ACGGCGUCCGCAAGUG | 1054 | UUACACUUGCGGACGCC | 1055 |
| | | UAATT | | GUTT | |
| 1211 | 1211-1229 | GCGUCCGCAAGUGUA | 1056 | UUCUUACACUUGCGGAC | 1057 |
| | | AGAATT | | GCTT | |
| 1212 | 1212-1230 | CGUCCGCAAGUGUAA | 1058 | CUUCUUACACUUGCGGA | 1059 |
| | | GAAGTT | | CGTT | |
| 1213 | 1213-1231 | GUCCGCAAGUGUAAG | 1060 | ACUUCUUACACUUGCGG | 1061 |
| | | AAGUTT | | ACTT | |
| 1214 | 1214-1232 | UCCGCAAGUGUAAGA | 1062 | CACUUCUUACACUUGCG | 1063 |
| | | AGUGTT | | GATT | |
| 1215 | 1215-1233 | CCGCAAGUGUAAGAA | 1064 | GCACUUCUUACACUUGC | 1065 |
| | | GUGCTT | | GGTT | |
| 1216 | 1216-1234 | CGCAAGUGUAAGAAG | 1066 | CGCACUUCUUACACUUG | 1067 |
| | | UGCGTT | | CGTT | |
| 1217 | 1217-1235 | GCAAGUGUAAGAAGU | 1068 | UCGCACUUCUUACACUU | 1069 |
| | | GCGATT | | GCTT | |
| 1219 | 1219-1237 | AAGUGUAAGAAGUGC | 1070 | CUUCGCACUUCUUACAC | 1071 |
| | | GAAGTT | | UUTT | |
| 1220 | 1220-1238 | AGUGUAAGAAGUGCG | 1072 | CCUUCGCACUUCUUACA | 1073 |
| | | AAGGTT | | CUTT | |
| 1221 | 1221-1239 | GUGUAAGAAGUGCGA | 1074 | CCCUUCGCACUUCUUAC | 1075 |
| | | AGGGTT | | ACTT | |
| 1222 | 1222-1240 | UGUAAGAAGUGCGAA | 1076 | GCCCUUCGCACUUCUUA | 1077 |
| | | GGGCTT | | CATT | |
| 1223 | 1223-1241 | GUAAGAAGUGCGAAG | 1078 | GGCCCUUCGCACUUCUU | 1079 |
| | | GGCCTT | | ACTT | |
| 1224 | 1224-1242 | UAAGAAGUGCGAAGG | 1080 | AGGCCCUUCGCACUUCU | 1081 |
| | | GCCUTT | | UATT | |
| 1225 | 1225-1243 | AAGAAGUGCGAAGGG | 1082 | AAGGCCCUUCGCACUUC | 1083 |
| | | CCUUTT | | UUTT | |
| 1226 | 1226-1244 | AGAAGUGCGAAGGGC | 1084 | CAAGGCCCUUCGCACUU | 1085 |
| | | CUUGTT | | CUTT | |
| 1229 | 1229-1247 | AGUGCGAAGGGCCUU | 1086 | CGGCAAGGCCCUUCGCA | 1087 |
| | | GCCGTT | | CUTT | |
| 1230 | 1230-1248 | GUGCGAAGGGCCUUG | 1088 | GCGGCAAGGCCCUUCGC | 1089 |
| | | CCGCTT | | ACTT | |
| 1231 | 1231-1249 | UGCGAAGGGCCUUGCC | 1090 | UGCGGCAAGGCCCUUCG | 1091 |
| | | GCATT | | CATT | |
| 1232 | 1232-1250 | GCGAAGGGCCUUGCCG | 1092 | UUGCGGCAAGGCCCUUC | 1093 |
| | | CAATT | | GCTT | |
| 1233 | 1233-1251 | CGAAGGGCCUUGCCGC | 1094 | UUUGCGGCAAGGCCCUU | 1095 |
| | | AAATT | | CGTT | |
| 1235 | 1235-1253 | AAGGGCCUUGCCGCAA | 1096 | ACUUUGCGGCAAGGCCC | 1097 |
| | | AGUTT | | UUTT | |
| 1236 | 1236-1254 | AGGGCCUUGCCGCAAA | 1098 | CACUUUGCGGCAAGGCC | 1099 |
| | | GUGTT | | CUTT | |
| 1237 | 1237-1255 | GGGCCUUGCCGCAAAG | 1100 | ACACUUUGCGGCAAGGC | 1101 |
| | | UGUTT | | CCTT | |
| 1238 | 1238-1256 | GGCCUUGCCGCAAAGU | 1102 | CACACUUUGCGGCAAGG | 1103 |
| | | GUGTT | | CCTT | |
| 1239 | 1239-1257 | GCCUUGCCGCAAAGUG | 1104 | ACACACUUUGCGGCAAG | 1105 |
| | | UGUTT | | GCTT | |
| 1241 | 1241-1259 | CUUGCCGCAAAGUGU | 1106 | UUACACACUUUGCGGCA | 1107 |
| | | GUAATT | | AGTT | |
| 1261 | 1261-1279 | GGAAUAGGUAUUGGU | 1108 | AUUCACCAAUACCUAUU | 1109 |
| | | GAAUTT | | CCTT | |
| 1262 | 1262-1280 | GAAUAGGUAUUGGUG | 1110 | AAUUCACCAAUACCUAU | 1111 |
| | | AAUUTT | | UCTT | |
| 1263 | 1263-1281 | AAUAGGUAUUGGUGA | 1112 | AAAUUCACCAAUACCUA | 1113 |
| | | AUUUTT | | UUTT | |
| 1264 | 1264-1282 | AUAGGUAUUGGUGAA | 1114 | UAAAUUCACCAAUACCU | 1115 |
| | | UUUATT | | AUTT | |
| 1266 | 1266-1284 | AGGUAUUGGUGAAUU | 1116 | UUUAAAUUCACCAAUAC | 1117 |
| | | UAAATT | | CUTT | |
| 1267 | 1267-1285 | GGUAUUGGUGAAUUU | 1118 | CUUUAAAUUCACCAAUA | 1119 |
| | | AAAGTT | | CCTT | |
| 1289 | 1289-1307 | CACUCUCCAUAAAUGC | 1120 | GUAGCAUUUAUGGAGA | 1121 |
| | | UACTT | | GUGTT | |
| 1313 | 1313-1331 | UUAAACACUUCAAAA | 1122 | CAGUUUUUGAAGUGUU | 1123 |
| | | ACUGTT | | UAATT | |
| 1320 | 1320-1338 | CUUCAAAAACUGCACC | 1124 | GGAGGUGCAGUUUUUG | 1125 |
| | | UCCTT | | AAGTT | |
| 1321 | 1321-1339 | UUCAAAAACUGCACCU | 1126 | UGGAGGUGCAGUUUUU | 1127 |
| | | CCATT | | GAATT | |
| 1322 | 1322-1340 | UCAAAAACUGCACCUC | 1128 | AUGGAGGUGCAGUUUU | 1129 |
| | | CAUTT | | UGATT | |
| 1323 | 1323-1341 | CAAAAACUGCACCUCC | 1130 | GAUGGAGGUGCAGUUU | 1131 |
| | | AUCTT | | UUGTT | |
| 1324 | 1324-1342 | AAAAACUGCACCUCCA | 1132 | UGAUGGAGGUGCAGUU | 1133 |
| | | UCATT | | UUUTT | |
| 1328 | 1328-1346 | ACUGCACCUCCAUCAG | 1134 | CCACUGAUGGAGGUGCA | 1135 |
| | | UGGTT | | GUTT | |
| 1332 | 1332-1350 | CACCUCCAUCAGUGGC | 1136 | AUCGCCACUGAUGGAGG | 1137 |
| | | GAUTT | | UGTT | |
| 1333 | 1333-1351 | ACCUCCAUCAGUGGCG | 1138 | GAUCGCCACUGAUGGAG | 1139 |
| | | AUCTT | | GUTT | |
| 1335 | 1335-1353 | CUCCAUCAGUGGCGAU | 1140 | GAGAUCGCCACUGAUGG | 1141 |
| | | CUCTT | | AGTT | |
| 1338 | 1338-1356 | CAUCAGUGGCGAUCUC | 1142 | GUGGAGAUCGCCACUGA | 1143 |
| | | CACTT | | UGTT | |
| 1344 | 1344-1362 | UGGCGAUCUCCACAUC | 1144 | CAGGAUGUGGAGAUCG | 1145 |
| | | CUGTT | | CCATT | |
| 1345 | 1345-1363 | GGCGAUCUCCACAUCC | 1146 | GCAGGAUGUGGAGAUC | 1147 |
| | | UGCTT | | GCCTT | |
| 1346 | 1346-1364 | GCGAUCUCCACAUCCU | 1148 | GGCAGGAUGUGGAGAU | 1149 |
| | | GCCTT | | CGCTT | |
| 1347 | 1347-1365 | CGAUCUCCACAUCCUG | 1150 | CGGCAGGAUGUGGAGA | 1151 |
| | | CCGTT | | UCGTT | |
| 1348 | 1348-1366 | GAUCUCCACAUCCUGC | 1152 | CCGGCAGGAUGUGGAG | 1153 |
| | | CGGTT | | AUCTT | |
| 1353 | 1353-1371 | CCACAUCCUGCCGGUG | 1154 | UGCCACCGGCAGGAUGU | 1155 |
| | | GCATT | | GGTT | |
| 1354 | 1354-1372 | CACAUCCUGCCGGUGG | 1156 | AUGCCACCGGCAGGAUG | 1157 |
| | | CAUTT | | UGTT | |
| 1355 | 1355-1373 | ACAUCCUGCCGGUGGC | 1158 | AAUGCCACCGGCAGGAU | 1159 |
| | | AUUTT | | GUTT | |
| 1357 | 1357-1375 | AUCCUGCCGGUGGCAU | 1160 | UAAAUGCCACCGGCAGG | 1161 |
| | | UUATT | | AUTT | |
| 1360 | 1360-1378 | CUGCCGGUGGCAUUU | 1162 | CCCUAAAUGCCACCGGC | 1163 |
| | | AGGGTT | | AGTT | |
| 1361 | 1361-1379 | UGCCGGUGGCAUUUA | 1164 | CCCCUAAAUGCCACCGG | 1165 |
| | | GGGGTT | | CATT | |
| 1362 | 1362-1380 | GCCGGUGGCAUUUAG | 1166 | ACCCCUAAAUGCCACCG | 1167 |
| | | GGGUTT | | GCTT | |
| 1363 | 1363-1381 | CCGGUGGCAUUUAGG | 1168 | CACCCCUAAAUGCCACC | 1169 |
| | | GGUGTT | | GGTT | |
| 1366 | 1366-1384 | GUGGCAUUUAGGGGU | 1170 | AGUCACCCCUAAAUGCC | 1171 |
| | | GACUTT | | ACTT | |
| 1369 | 1369-1387 | GCAUUUAGGGGUGAC | 1172 | AGGAGUCACCCCUAAAU | 1173 |
| | | UCCUTT | | GCTT | |
| 1370 | 1370-1388 | CAUUUAGGGGUGACU | 1174 | AAGGAGUCACCCCUAAA | 1175 |
| | | CCUUTT | | UGTT | |
| 1371 | 1371-1389 | AUUUAGGGGUGACUC | 1176 | GAAGGAGUCACCCCUAA | 1177 |
| | | CUUCTT | | AUTT | |
| 1372 | 1372-1390 | UUUAGGGGUGACUCC | 1178 | UGAAGGAGUCACCCCUA | 1179 |
| | | UUCATT | | AATT | |
| 1373 | 1373-1391 | UUAGGGGUGACUCCU | 1180 | GUGAAGGAGUCACCCCU | 1181 |
| | | UCACTT | | AATT | |
| 1374 | 1374-1392 | UAGGGGUGACUCCUU | 1182 | UGUGAAGGAGUCACCCC | 1183 |
| | | CACATT | | UATT | |
| 1404 | 1404-1422 | UCUGGAUCCACAGGA | 1184 | CAGUUCCUGUGGAUCCA | 1185 |
| | | ACUGTT | | GATT | |
| 1408 | 1408-1426 | GAUCCACAGGAACUG | 1186 | UAUCCAGUUCCUGUGGA | 1187 |
| | | GAUATT | | UCTT | |
| 1409 | 1409-1427 | AUCCACAGGAACUGG | 1188 | AUAUCCAGUUCCUGUGG | 1189 |
| | | AUAUTT | | AUTT | |
| 1411 | 1411-1429 | CCACAGGAACUGGAU | 1190 | GAAUAUCCAGUUCCUGU | 1191 |
| | | AUUCTT | | GGTT | |
| 1412 | 1412-1430 | CACAGGAACUGGAUA | 1192 | AGAAUAUCCAGUUCCUG | 1193 |
| | | UUCUTT | | UGTT | |
| 1419 | 1419-1437 | ACUGGAUAUUCUGAA | 1194 | GGUUUUCAGAAUAUCC | 1195 |
| | | AACCTT | | AGUTT | |
| 1426 | 1426-1444 | AUUCUGAAAACCGUA | 1196 | CCUUUACGGUUUUCAGA | 1197 |
| | | AAGGTT | | AUTT | |
| 1427 | 1427-1445 | UUCUGAAAACCGUAA | 1198 | UCCUUUACGGUUUUCAG | 1199 |
| | | AGGATT | | AATT | |
| 1430 | 1430-1448 | UGAAAACCGUAAAGG | 1200 | AUUUCCUUUACGGUUU | 1201 |
| | | AAAUTT | | UCATT | |
| 1431 | 1431-1449 | GAAAACCGUAAAGGA | 1202 | GAUUUCCUUUACGGUU | 1203 |
| | | AAUCTT | | UUCTT | |

TABLE 6
EGFR siRNA Sequences with Chemical Modifications

| | Sequence | | SEQ | | SEQ |
|---|---|---|---|---|---|
| hs Id | position in | sense strand sequence | ID | antisense strand sequence | ID |
| # | NM_005228.3 | (5′-3′) | NO: | (5′-3′) | NO: |
| 68 | 68-86 | cgGfcCfgGfaGfuCfcCfgAfg | 1204 | UfAfgCfuCfgGfgAfcUfcCfgG | 1205 |
| | | CfuAfdTsdT | | fcCfgdTsdT | |
| 71 | 71-89 | ccGfgAfgUfcCfcGfaGfcUfa | 1206 | GfGfcUfaGfcUfcGfgGfaCfuC | 1207 |
| | | GfcCfdTsdT | | fcGfgdTsdT | |
| 72 | 72-90 | cgGfaGfuCfcCfgAfgCfuAfg | 1208 | GfGfgCfuAfgCfuCfgGfgAfcU | 1209 |
| | | CfcCfdTsdT | | fcCfgdTsdT | |
| 73 | 73-91 | ggAfgUfcCfcGfaGfcUfaGfc | 1210 | GfGfgGfcUfaGfcUfcGfgGfaC | 1211 |
| | | CfcCfdTsdT | | fuCfcdTsdT | |
| 74 | 74-92 | gaGfuCfcCfgAfgCfuAfgCfc | 1212 | CfGfgGfgCfuAfgCfuCfgGfgA | 1213 |
| | | CfcGfdTsdT | | fcUfcdTsdT | |
| 75 | 75-93 | agUfcCfcGfaGfcUfaGfcCfc | 1214 | CfCfgGfgGfcUfaGfcUfcGfgG | 1215 |
| | | CfgGfdTsdT | | faCfudTsdT | |
| 76 | 76-94 | guCfcCfgAfgCfuAfgCfcCfc | 1216 | GfCfcGfgGfgCfuAfgCfuCfgG | 1217 |
| | | GfgCfdTsdT | | fgAfcdTsdT | |
| 78 | 78-96 | ccCfgAfgCfuAfgCfcCfcGfg | 1218 | CfCfgCfcGfgGfgCfuAfgCfuC | 1219 |
| | | CfgGfdTsdT | | fgGfgdTsdT | |
| 114 | 114-132 | ggAfcGfaCfaGfgCfcAfcCfu | 1220 | AfCfgAfgGfuGfgCfcUfgUfcG | 1221 |
| | | CfgUfdTsdT | | fuCfcdTsdT | |
| 115 | 115-133 | gaCfgAfcAfgGfcCfaCfcUfc | 1222 | GfAfcGfaGfgUfgGfcCfuGfuC | 1223 |
| | | GfuCfdTsdT | | fgUfcdTsdT | |
| 116 | 116-134 | acGfaCfaGfgCfcAfcCfuCfg | 1224 | CfGfaCfgAfgGfuGfgCfcUfgU | 1225 |
| | | UfcGfdTsdT | | fcGfudTsdT | |
| 117 | 117-135 | cgAfcAfgGfcCfaCfcUfcGfu | 1226 | CfCfgAfcGfaGfgUfgGfcCfuG | 1227 |
| | | CfgGfdTsdT | | fuCfgdTsdT | |
| 118 | 118-136 | gaCfaGfgCfcAfcCfuCfgUfc | 1228 | GfCfcGfaCfgAfgGfuGfgCfcU | 1229 |
| | | GfgCfdTsdT | | fgUfcdTsdT | |
| 120 | 120-138 | caGfgCfcAfcCfuCfgUfcGfg | 1230 | AfCfgCfcGfaCfgAfgGfuGfgC | 1231 |
| | | CfgUfdTsdT | | fcUfgdTsdT | |
| 121 | 121-139 | agGfcCfaCfcUfcGfuCfgGfc | 1232 | GfAfcGfcCfgAfcGfaGfgUfgG | 1233 |
| | | GfuCfdTsdT | | fcCfudTsdT | |
| 122 | 122-140 | ggCfcAfcCfuCfgUfcGfgCfg | 1234 | GfGfaCfgCfcGfaCfgAfgGfuG | 1235 |
| | | UfcCfdTsdT | | fgCfcdTsdT | |
| 123 | 123-141 | gcCfaCfcUfcGfuCfgGfcGfu | 1236 | CfGfgAfcGfcCfgAfcGfaGfgU | 1237 |
| | | CfcGfdTsdT | | fgGfcdTsdT | |
| 124 | 124-142 | ccAfcCfuCfgUfcGfgCfgUfc | 1238 | GfCfgGfaCfgCfcGfaCfgAfgG | 1239 |
| | | CfgCfdTsdT | | fuGfgdTsdT | |
| 125 | 125-143 | caCfcUfcGfuCfgGfcGfuCfc | 1240 | GfGfcGfgAfcGfcCfgAfcGfaG | 1241 |
| | | GfcCfdTsdT | | fgUfgdTsdT | |
| 126 | 126-144 | acCfuCfgUfcGfgCfgUfcCfg | 1242 | GfGfgCfgGfaCfgCfcGfaCfgA | 1243 |
| | | CfcCfdTsdT | | fgGfudTsdT | |
| 127 | 127-145 | ccUfcGfuCfgGfcGfuCfcGfc | 1244 | CfGfgGfcGfgAfcGfcCfgAfcG | 1245 |
| | | CfcGfdTsdT | | faGfgdTsdT | |
| 128 | 128-146 | cuCfgUfcGfgCfgUfcCfgCfc | 1246 | UfCfgGfgCfgGfaCfgCfcGfaC | 1247 |
| | | CfgAfdTsdT | | fgAfgdTsdT | |
| 129 | 129-147 | ucGfuCfgGfcGfuCfcGfcCfc | 1248 | CfUfcGfgGfcGfgAfcGfcCfgA | 1249 |
| | | GfaGfdTsdT | | fcGfadTsdT | |
| 130 | 130-148 | cgUfcGfgCfgUfcCfgCfcCfg | 1250 | AfCfuCfgGfgCfgGfaCfgCfcG | 1251 |
| | | AfgUfdTsdT | | faCfgdTsdT | |
| 131 | 131-149 | guCfgGfcGfuCfcGfcCfcGfa | 1252 | GfAfc-UfcGfgGfcGfgAfcGfcC | 1253 |
| | | GfuCfdTsdT | | fgAfcdTsdT | |
| 132 | 132-150 | ucGfgCfgUfcCfgCfcCfgAfg | 1254 | GfGfaCfuCfgGfgCfgGfaCfgC | 1255 |
| | | UfcCfdTsdT | | fcGfadTsdT | |
| 135 | 135-153 | gcGfuCfcGfcCfcGfaGfuCfc | 1256 | CfGfgGfgAfc-UfcGfgGfcGfgA | 1257 |
| | | CfcGfdTsdT | | fcGfcdTsdT | |
| 136 | 136-154 | cgUfcCfgCfcCfgAfgUfcCfc | 1258 | GfCfgGfgGfaCfuCfgGfgCfgG | 1259 |
| | | CfgCfdTsdT | | faCfgdTsdT | |
| 141 | 141-159 | gcCfcGfaGfuCfcCfcGfcCfu | 1260 | GfCfgAfgGfcGfgGfgAfc-UfcG | 1261 |
| | | CfgCfdTsdT | | fgGfcdTsdT | |
| 164 | 164-182 | aaCfgCfcAfcAfaCfcAfcCfg | 1262 | GfCfgCfgGfuGfgUfuGfuGfgC | 1263 |
| | | CfgCfdTsdT | | fgUfudTsdT | |
| 165 | 165-183 | acGfcCfaCfaAfcCfaCfcGfc | 1264 | UfGfcGfcGfgUfgGfuUfgUfg | 1265 |
| | | GfcAfdTsdT | | GfcGfudTsdT | |
| 166 | 166-184 | cgCfcAfcAfaCfcAfcCfgCfg | 1266 | GfUfgCfgCfgGfuGfgUfuGfu | 1267 |
| | | CfaCfdTsdT | | GfgCfgdTsdT | |
| 168 | 168-186 | ccAfcAfaCfcAfcCfgCfgCfa | 1268 | CfCfgUfgCfgCfgGfuGfgUfuG | 1269 |
| | | CfgGfdTsdT | | fuGfgdTsdT | |
| 169 | 169-187 | caCfaAfcCfaCfcGfcGfcAfc | 1270 | GfCfcGfuGfcGfcGfgUfgGfuU | 1271 |
| | | GfgCfdTsdT | | fgUfgdTsdT | |
| 170 | 170-188 | acAfaCfcAfcCfgCfgCfaCfg | 1272 | GfGfcCfgUfgCfgCfgGfuGfgU | 1273 |
| | | GfcCfdTsdT | | fuGfudTsdT | |
| 247 | 247-265 | auGfcGfaCfcCfuCfcGfgGfa | 1274 | CfCfgUfcCfcGfgAfgGfgUfcG | 1275 |
| | | CfgGfdTsdT | | fcAfudTsdT | |
| 248 | 248-266 | ugCfgAfcCfcUfcCfgGfgAfc | 1276 | GfCfcGfuCfcCfgGfaGfgGfuC | 1277 |
| | | GfgCfdTsdT | | fgCfadTsdT | |
| 249 | 249-267 | gcGfaCfcCfuCfcGfgGfaCfg | 1278 | GfGfcCfgUfcCfcGfgAfgGfgU | 1279 |
| | | GfcCfdTsdT | | fcGfcdTsdT | |
| 251 | 251-269 | gaCfcCfuCfcGfgGfaCfgGfc | 1280 | CfCfgGfcCfgUfcCfcGfgAfgG | 1281 |
| | | CfgGfdTsdT | | fgUfcdTsdT | |
| 252 | 252-270 | acCfcUfcCfgGfgAfcGfgCfc | 1282 | CfCfcGfgCfcGfuCfcCfgGfaGf | 1283 |
| | | GfgGfdTsdT | | gGfudTsdT | |
| 254 | 254-272 | ccUfcCfgGfgAfcGfgCfcGfg | 1284 | GfCfcCfcGfgCfcGfuCfcCfgGf | 1285 |
| | | GfgCfdTsdT | | aGfgdTsdT | |
| 329 | 329-347 | agAfaAfgUfuUfgCfcAfaGfg | 1286 | GfUfgCfcUfuGfgCfaAfaCfuU | 1287 |
| | | CfaCfdTsdT | | fuCfudTsdT | |
| 330 | 330-348 | gaAfaGfuUfuGfcCfaAfgGfc | 1288 | CfGfuGfcCfuUfgGfcAfaAfcU | 1289 |
| | | AfcGfdTsdT | | fuUfcdTsdT | |
| 332 | 332-350 | aaGfuUfuGfcCfaAfgGfcAfc | 1290 | CfUfcGfuGfcCfuUfgGfcAfaA | 1291 |
| | | GfaGfdTsdT | | fcUfudTsdT | |
| 333 | 333-351 | agUfuUfgCfcAfaGfgCfaCfg | 1292 | AfCfuCfgUfgCfcUfuGfgCfaA | 1293 |
| | | AfgUfdTsdT | | faCfudTsdT | |
| 334 | 334-352 | guUfuGfcCfaAfgGfcAfcGfa | 1294 | UfAfcUfcGfuGfcCfuUfgGfcA | 1295 |
| | | GfuAfdTsdT | | faAfcdTsdT | |
| 335 | 335-353 | uuUfgCfcAfaGfgCfaCfgAfg | 1296 | UfUfaCfuCfgUfgCfcUfuGfgC | 1297 |
| | | UfaAfdTsdT | | faAfadTsdT | |
| 336 | 336-354 | uuGfcCfaAfgGfcAfcGfaGfu | 1298 | GfUfuAfcUfcGfuGfcCfuUfgG | 1299 |
| | | AfaCfdTsdT | | fcAfadTsdT | |
| 337 | 337-355 | ugCfcAfaGfgCfaCfgAfgUfa | 1300 | UfGfuUfaCfuCfgUfgCfcUfuG | 1301 |
| | | AfcAfdTsdT | | fgCfadTsdT | |
| 338 | 338-356 | gcCfaAfgGfcAfcGfaGfuAfa | 1302 | UfUfgUfuAfcUfcGfuGfcCfuU | 1303 |
| | | CfaAfdTsdT | | fgGfcdTsdT | |
| 361 | 361-379 | acGfcAfgUfuGfgGfcAfcUfu | 1304 | CfAfaAfaGfuGfcCfcAfaCfuG | 1305 |
| | | UfuGfdTsdT | | fcGfudTsdT | |
| 362 | 362-380 | cgCfaGfuUfgGfgCfaCfuUfu | 1306 | UfCfaAfaAfgUfgCfcCfaAfcU | 1307 |
| | | UfgAfdTsdT | | fgCfgdTsdT | |
| 363 | 363-381 | gcAfgUfuGfgGfcAfcUfuUfu | 1308 | UfUfcAfaAfaGfuGfcCfcAfaC | 1309 |
| | | GfaAfdTsdT | | fuGfcdTsdT | |
| 364 | 364-382 | caGfuUfgGfgCfaCfuUfuUfg | 1310 | CfUfuCfaAfaAfgUfgCfcCfaA | 1311 |
| | | AfaGfdTsdT | | fcUfgdTsdT | |
| 365 | 365-383 | agUfuGfgGfcAfcUfuUfuGfa | 1312 | UfCfuUfcAfaAfaGfuGfcCfcA | 1313 |
| | | AfgAfdTsdT | | faCfudTsdT | |
| 366 | 366-384 | guUfgGfgCfaCfuUfuUfgAfa | 1314 | AfUfcUfuCfaAfaAfgUfgCfcC | 1315 |
| | | GfaUfdTsdT | | faAfcdTsdT | |
| 367 | 367-385 | uuGfgGfcAfcUfuUfuGfaAfg | 1316 | GfAfuCfuUfcAfaAfaGfuGfcC | 1317 |
| | | AfuCfdTsdT | | fcAfadTsdT | |
| 368 | 368-386 | ugGfgCfaCfuUfuUfgAfaGfa | 1318 | UfGfaUfcUfuCfaAfaAfgUfgC | 1319 |
| | | UfcAfdTsdT | | fcCfadTsdT | |
| 369 | 369-387 | ggGfcAfcUfuUfuGfaAfgAfu | 1320 | AfUfgAfuCfuUfcAfaAfaGfuG | 1321 |
| | | CfaUfdTsdT | | fcCfcdTsdT | |
| 377 | 377-395 | uuGfaAfgAfuCfaUfuUfuCfu | 1322 | CfUfgAfgAfaAfaUfgAfuCfuU | 1323 |
| | | CfaGfdTsdT | | fcAfadTsdT | |
| 379 | 379-397 | gaAfgAfuCfaUfuUfuCfuCfa | 1324 | GfGfcUfgAfgAfaAfaUfgAfuC | 1325 |
| | | GfcCfdTsdT | | fuUfcdTsdT | |
| 380 | 380-398 | aaGfaUfcAfuUfuUfcUfcAfg | 1326 | AfGfgCfuGfaGfaAfaAfuGfaU | 1327 |
| | | CfcUfdTsdT | | fcUfudTsdT | |
| 385 | 385-403 | caUfuUfuCfuCfaGfcCfuCfc | 1328 | UfCfuGfgAfgGfcUfgAfgAfaA | 1329 |
| | | AfgAfdTsdT | | faUfgdTsdT | |
| 394 | 394-412 | agCfcUfcCfaGfaGfgAfuGfu | 1330 | UfGfaAfcAfuCfcUfcUfgGfaG | 1331 |
| | | UfcAfdTsdT | | fgCfudTsdT | |
| 396 | 396-414 | ccUfcCfaGfaGfgAfuGfuUfc | 1332 | AfUfuGfaAfcAfuCfcUfcUfgG | 1333 |
| | | AfaUfdTsdT | | faGfgdTsdT | |
| 397 | 397-415 | cuCfcAfgAfgGfaUfgUfuCfa | 1334 | UfAfuUfgAfaCfaUfcCfuCfuG | 1335 |
| | | AfuAfdTsdT | | fgAfgdTsdT | |
| 401 | 401-419 | agAfgGfaUfgUfuCfaAfuAfa | 1336 | CfAfgUfuAfuUfgAfaCfaUfcC | 1337 |
| | | CfuGfdTsdT | | fuCfudTsdT | |
| 403 | 403-421 | agGfaUfgUfuCfaAfuAfaCfu | 1338 | CfAfcAfgUfuAfuUfgAfaCfaU | 1339 |
| | | GfuGfdTsdT | | fcCfudTsdT | |
| 407 | 407-425 | ugUfuCfaAfuAfaCfuGfuGfa | 1340 | AfCfcUfcAfcAfgUfuAfuUfgA | 1341 |
| | | GfgUfdTsdT | | faCfadTsdT | |
| 409 | 409-427 | uuCfaAfuAfaCfuGfuGfaGfg | 1342 | CfCfaCfcUfcAfcAfgUfuAfuU | 1343 |
| | | UfgGfdTsdT | | fgAfadTsdT | |
| 410 | 410-428 | ucAfaUfaAfcUfgUfgAfgGfu | 1344 | AfCfcAfcCfuCfaCfaGfuUfaUf | 1345 |
| | | GfgUfdTsdT | | uGfadTsdT | |
| 411 | 411-429 | caAfuAfaCfuGfuGfaGfgUfg | 1346 | GfAfcCfaCfcUfcAfcAfgUfuA | 1347 |
| | | GfuCfdTsdT | | fuUfgdTsdT | |
| 412 | 412-430 | aaUfaAfcUfgUfgAfgGfuGfg | 1348 | GfGfaCfcAfcCfuCfaCfaGfuUf | 1349 |
| | | UfcCfdTsdT | | aUfudTsdT | |
| 413 | 413-431 | auAfaCfuGfuGfaGfgUfgGfu | 1350 | AfGfgAfcCfaCfcUfcAfcAfgU | 1351 |
| | | CfcUfdTsdT | | fuAfudTsdT | |
| 414 | 414-432 | uaAfcUfgUfgAfgGfuGfgUfc | 1352 | AfAfgGfaCfcAfcCfuCfaCfaGf | 1353 |
| | | CfuUfdTsdT | | uUfadTsdT | |
| 416 | 416-434 | acUfgUfgAfgGfuGfgUfcCfu | 1354 | CfCfaAfgGfaCfcAfcCfuCfaCf | 1355 |
| | | UfgGfdTsdT | | aGfudTsdT | |
| 418 | 418-436 | ugUfgAfgGfuGfgUfcCfuUf | 1356 | UfCfcCfaAfgGfaCfcAfcCfuCf | 1357 |
| | | gGfgAfdTsdT | | aCfadTsdT | |
| 419 | 419-437 | guGfaGfgUfgGfuCfcUfuGfg | 1358 | UfUfcCfcAfaGfgAfcCfaCfcUf | 1359 |
| | | GfaAfdTsdT | | cAfcdTsdT | |
| 425 | 425-443 | ugGfuCfcUfuGfgGfaAfuUfu | 1360 | UfCfcAfaAfuUfcCfcAfaGfgA | 1361 |
| | | GfgAfdTsdT | | fcCfadTsdT | |
| 431 | 431-449 | uuGfgGfaAfuUfuGfgAfaAf | 1362 | GfUfaAfuUfuCfcAfaAfuUfcC | 1363 |
| | | uUfaCfdTsdT | | fcAfadTsdT | |
| 432 | 432-450 | ugGfgAfaUfuUfgGfaAfaUfu | 1364 | GfGfuAfaUfuUfcCfaAfaUfuC | 1365 |
| | | AfcCfdTsdT | | fcCfadTsdT | |
| 433 | 433-451 | ggGfaAfuUfuGfgAfaAfuUfa | 1366 | AfGfgUfaAfuUfuCfcAfaAfuU | 1367 |
| | | CfcUfdTsdT | | fcCfcdTsdT | |
| 434 | 434-452 | ggAfaUfuUfgGfaAfaUfuAfc | 1368 | UfAfgGfuAfaUfuUfcCfaAfaU | 1369 |
| | | CfuAfdTsdT | | fuCfcdTsdT | |
| 458 | 458-476 | agAfgGfaAfuUfaUfgAfuCfu | 1370 | GfAfaAfgAfuCfaUfaAfuUfcC | 1371 |
| | | UfuCfdTsdT | | fuCfudTsdT | |
| 459 | 459-477 | gaGfgAfaUfuAfuGfaUfcUfu | 1372 | GfGfaAfaGfaUfcAfuAfaUfuC | 1373 |
| | | UfcCfdTsdT | | fcUfcdTsdT | |
| 463 | 463-481 | aaUfuAfuGfaUfcUfuUfcCfu | 1374 | AfGfaAfgGfaAfaGfaUfcAfuA | 1375 |
| | | UfcUfdTsdT | | faUfudTsdT | |
| 464 | 464-482 | auUfaUfgAfuCfuUfuCfcUfu | 1376 | AfAfgAfaGfgAfaAfgAfuCfaU | 1377 |
| | | CfuUfdTsdT | | faAfudTsdT | |
| 466 | 466-484 | uaUfgAfuCfuUfuCfcUfuCfu | 1378 | UfUfaAfgAfaGfgAfaAfgAfuC | 1379 |
| | | UfaAfdTsdT | | faUfadTsdT | |
| 468 | 468-486 | ugAfuCfuUfuCfcUfuCfuUfa | 1380 | CfUfuUfaAfgAfaGfgAfaAfgA | 1381 |
| | | AfaGfdTsdT | | fuCfadTsdT | |
| 471 | 471-489 | ucUfuUfcCfuUfcUfuAfaAfg | 1382 | GfGfuCfuUfuAfaGfaAfgGfaA | 1383 |
| | | AfcCfdTsdT | | faGfadTsdT | |
| 476 | 476-494 | ccUfuCfuUfaAfaGfaCfcAfu | 1384 | UfGfgAfuGfgUfcUfuUfaAfg | 1385 |
| | | CfcAfdTsdT | | AfaGfgdTsdT | |
| 477 | 477-495 | cuUfcUfuAfaAfgAfcCfaUfc | 1386 | CfUfgGfaUfgGfuCfuUfuAfaG | 1387 |
| | | CfaGfdTsdT | | faAfgdTsdT | |
| 479 | 479-497 | ucUfuAfaAfgAfcCfaUfcCfa | 1388 | UfCfcUfgGfaUfgGfuCfuUfuA | 1389 |
| | | GfgAfdTsdT | | faGfadTsdT | |
| 481 | 481-499 | uuAfaAfgAfcCfaUfcCfaGfg | 1390 | CfCfuCfcUfgGfaUfgGfuCfuU | 1391 |
| | | AfgGfdTsdT | | fuAfadTsdT | |
| 482 | 482-500 | uaAfaGfaCfcAfuCfcAfgGfa | 1392 | AfCfcUfcCfuGfgAfuGfgUfcU | 1393 |
| | | GfgUfdTsdT | | fuUfadTsdT | |
| 492 | 492-510 | ccAfgGfaGfgUfgGfcUfgGfu | 1394 | AfUfaAfcCfaGfcCfaCfcUfcCf | 1395 |
| | | UfaUfdTsdT | | uGfgdTsdT | |
| 493 | 493-511 | caGfgAfgGfuGfgCfuGfgUfu | 1396 | CfAfuAfaCfcAfgCfcAfcCfuCf | 1397 |
| | | AfuGfdTsdT | | cUfgdTsdT | |
| 494 | 494-512 | agGfaGfgUfgGfcUfgGfuUfa | 1398 | AfCfaUfaAfcCfaGfcCfaCfcUf | 1399 |
| | | UfgUfdTsdT | | cCfudTsdT | |
| 495 | 495-513 | ggAfgGfuGfgCfuGfgUfuAf | 1400 | GfAfcAfuAfaCfcAfgCfcAfcC | 1401 |
| | | uGfuCfdTsdT | | fuCfcdTsdT | |
| 496 | 496-514 | gaGfgUfgGfcUfgGfuUfaUfg | 1402 | GfGfaCfaUfaAfcCfaGfcCfaCf | 1403 |
| | | UfcCfdTsdT | | cUfcdTsdT | |
| 497 | 497-515 | agGfuGfgCfuGfgUfuAfuGf | 1404 | AfGfgAfcAfuAfaCfcAfgCfcA | 1405 |
| | | uCfcUfdTsdT | | fcCfudTsdT | |
| 499 | 499-517 | guGfgCfuGfgUfuAfuGfuCfc | 1406 | UfGfaGfgAfcAfuAfaCfcAfgC | 1407 |
| | | UfcAfdTsdT | | fcAfcdTsdT | |
| 520 | 520-538 | gcCfcUfcAfaCfaCfaGfuGfg | 1408 | GfCfuCfcAfcUfgUfgUfuGfaG | 1409 |
| | | AfgCfdTsdT | | fgGfcdTsdT | |
| 542 | 542-560 | uuCfcUfuUfgGfaAfaAfcCfu | 1410 | UfGfcAfgGfuUfuUfcCfaAfaG | 1411 |
| | | GfcAfdTsdT | | fgAfadTsdT | |
| 543 | 543-561 | ucCfuUfuGfgAfaAfaCfcUfg | 1412 | CfUfgCfaGfgUfuUfuCfcAfaA | 1413 |
| | | CfaGfdTsdT | | fgGfadTsdT | |
| 550 | 550-568 | gaAfaAfcCfuGfcAfgAfuCfa | 1414 | UfGfaUfgAfuCfuGfcAfgGfuU | 1415 |
| | | UfcAfdTsdT | | fuUfcdTsdT | |
| 551 | 551-569 | aaAfaCfcUfgCfaGfaUfcAfu | 1416 | CfUfgAfuGfaUfcUfgCfaGfgU | 1417 |
| | | CfaGfdTsdT | | fuUfudTsdT | |
| 553 | 553-571 | aaCfcUfgCfaGfaUfcAfuCfa | 1418 | CfUfcUfgAfuGfaUfcUfgCfaG | 1419 |
| | | GfaGfdTsdT | | fgUfudTsdT | |
| 556 | 556-574 | cuGfcAfgAfuCfaUfcAfgAfg | 1420 | UfUfcCfuCfuGfaUfgAfuCfuG | 1421 |
| | | GfaAfdTsdT | | fcAfgdTsdT | |
| 586 | 586-604 | gaAfaAfuUfcCfuAfuGfcCfu | 1422 | CfUfaAfgGfcAfuAfgGfaAfuU | 1423 |
| | | UfaGfdTsdT | | fuUfcdTsdT | |
| 587 | 587-605 | aaAfaUfuCfcUfaUfgCfcUfu | 1424 | GfCfuAfaGfgCfaUfaGfgAfaU | 1425 |
| | | AfgCfdTsdT | | fuUfudTsdT | |
| 589 | 589-607 | aaUfuCfcUfaUfgCfcUfuAfg | 1426 | CfUfgCfuAfaGfgCfaUfaGfgA | 1427 |
| | | CfaGfdTsdT | | faUfudTsdT | |
| 592 | 592-610 | ucCfuAfuGfcCfuUfaGfcAfg | 1428 | AfGfaCfuGfcUfaAfgGfcAfuA | 1429 |
| | | UfcUfdTsdT | | fgGfadTsdT | |
| 593 | 593-611 | ccUfaUfgCfcUfuAfgCfaGfu | 1430 | AfAfgAfcUfgCfuAfaGfgCfaU | 1431 |
| | | CfuUfdTsdT | | faGfgdTsdT | |
| 594 | 594-612 | cuAfuGfcCfuUfaGfcAfgUfc | 1432 | UfAfaGfaCfuGfcUfaAfgGfcA | 1433 |
| | | UfuAfdTsdT | | fuAfgdTsdT | |
| 596 | 596-614 | auGfcCfuUfaGfcAfgUfcUfu | 1434 | GfAfuAfaGfaCfuGfcUfaAfgG | 1435 |
| | | AfuCfdTsdT | | fcAfudTsdT | |
| 597 | 597-615 | ugCfcUfuAfgCfaGfuCfuUfa | 1436 | AfGfaUfaAfgAfcUfgCfuAfaG | 1437 |
| | | UfcUfdTsdT | | fgCfadTsdT | |
| 598 | 598-616 | gcCfuUfaGfcAfgUfcUfuAfu | 1438 | UfAfgAfuAfaGfaCfuGfcUfaA | 1439 |
| | | CfuAfdTsdT | | fgGfcdTsdT | |
| 599 | 599-617 | ccUfuAfgCfaGfuCfuUfaUfc | 1440 | UfUfaGfaUfaAfgAfcUfgCfuA | 1441 |
| | | UfaAfdTsdT | | faGfgdTsdT | |
| 600 | 600-618 | cuUfaGfcAfgUfcUfuAfuCfu | 1442 | GfUfuAfgAfuAfaGfaCfuGfcU | 1443 |
| | | AfaCfdTsdT | | faAfgdTsdT | |
| 601 | 601-619 | uuAfgCfaGfuCfuUfaUfcUfa | 1444 | AfGfuUfaGfaUfaAfgAfcUfgC | 1445 |
| | | AfcUfdTsdT | | fuAfadTsdT | |
| 602 | 602-620 | uaGfcAfgUfcUfuAfuCfuAfa | 1446 | UfAfgUfuAfgAfuAfaGfaCfuG | 1447 |
| | | CfuAfdTsdT | | fcUfadTsdT | |
| 603 | 603-621 | agCfaGfuCfuUfaUfcUfaAfc | 1448 | AfUfaGfuUfaGfaUfaAfgAfcU | 1449 |
| | | UfaUfdTsdT | | fgCfudTsdT | |
| 604 | 604-622 | gcAfgUfcUfuAfuCfuAfaCfu | 1450 | CfAfuAfgUfuAfgAfuAfaGfaC | 1451 |
| | | AfuGfdTsdT | | fuGfcdTsdT | |
| 605 | 605-623 | caGfuCfuUfaUfcUfaAfcUfa | 1452 | UfCfaUfaGfuUfaGfaUfaAfgA | 1453 |
| | | UfgAfdTsdT | | fcUfgdTsdT | |
| 608 | 608-626 | ucUfuAfuCfuAfaCfuAfuGfa | 1454 | GfCfaUfcAfuAfgUfuAfgAfuA | 1455 |
| | | UfgCfdTsdT | | faGfadTsdT | |
| 609 | 609-627 | cuUfaUfcUfaAfcUfaUfgAfu | 1456 | UfGfcAfuCfaUfaGfuUfaGfaU | 1457 |
| | | GfcAfdTsdT | | faAfgdTsdT | |
| 610 | 610-628 | uuAfuCfuAfaCfuAfuGfaUfg | 1458 | UfUfgCfaUfcAfuAfgUfuAfgA | 1459 |
| | | CfaAfdTsdT | | fuAfadTsdT | |
| 611 | 611-629 | uaUfcUfaAfcUfaUfgAfuGfc | 1460 | UfUfuGfcAfuCfaUfaGfuUfaG | 1461 |
| | | AfaAfdTsdT | | faUfadTsdT | |
| 612 | 612-630 | auCfuAfaCfuAfuGfaUfgCfa | 1462 | AfUfuUfgCfaUfcAfuAfgUfuA | 1463 |
| | | AfaUfdTsdT | | fgAfudTsdT | |
| 613 | 613-631 | ucUfaAfcUfaUfgAfuGfcAfa | 1464 | UfAfuUfuGfcAfuCfaUfaGfuU | 1465 |
| | | AfuAfdTsdT | | faGfadTsdT | |
| 614 | 614-632 | cuAfaCfuAfuGfaUfgCfaAfa | 1466 | UfUfaUfuUfgCfaUfcAfuAfgU | 1467 |
| | | UfaAfdTsdT | | fuAfgdTsdT | |
| 616 | 616-634 | aaCfuAfuGfaUfgCfaAfaUfa | 1468 | UfUfuUfaUfuUfgCfaUfcAfuA | 1469 |
| | | AfaAfdTsdT | | fgUfudTsdT | |
| 622 | 622-640 | gaUfgCfaAfaUfaAfaAfcCfg | 1470 | GfUfcCfgGfuUfuUfaUfuUfgC | 1471 |
| | | GfaCfdTsdT | | faUfcdTsdT | |
| 623 | 623-641 | auGfcAfaAfuAfaAfaCfcGfg | 1472 | AfGfuCfcGfgUfutifuAfuUfu | 1473 |
| | | AfcUfdTsdT | | GfcAfudTsdT | |
| 624 | 624-642 | ugCfaAfaUfaAfaAfcCfgGfa | 1474 | CfAfgUfcCfgGfuUfuUfaUfuU | 1475 |
| | | CfuGfdTsdT | | fgCfadTsdT | |
| 626 | 626-644 | caAfaUfaAfaAfcCfgGfaCfu | 1476 | UfUfcAfgUfcCfgGfuUfuUfaU | 1477 |
| | | GfaAfdTsdT | | fuUfgdTsdT | |
| 627 | 627-645 | aaAfuAfaAfaCfcGfgAfcUfg | 1478 | CfUfuCfaGfuCfcGfgUfuUfuA | 1479 |
| | | AfaGfdTsdT | | fuUfudTsdT | |
| 628 | 628-646 | aaUfaAfaAfcCfgGfaCfuGfa | 1480 | CfCfuUfcAfgUfcCfgGfuUfuU | 1481 |
| | | AfgGfdTsdT | | faUfudTsdT | |
| 630 | 630-648 | uaAfaAfcCfgGfaCfuGfaAfg | 1482 | CfUfcCfuUfcAfgUfcCfgGfuU | 1483 |
| | | GfaGfdTsdT | | fuUfadTsdT | |
| 631 | 631-649 | aaAfaCfcGfgAfcUfgAfaGfg | 1484 | GfCfuCfcUfuCfaGfuCfcGfgU | 1485 |
| | | AfgCfdTsdT | | fuUfudTsdT | |
| 632 | 632-650 | aaAfcCfgGfaCfuGfaAfgGfa | 1486 | AfGfcUfcCfuUfcAfgUfcCfgG | 1487 |
| | | GfcUfdTsdT | | fuUfudTsdT | |
| 633 | 633-651 | aaCfcGfgAfcUfgAfaGfgAfg | 1488 | CfAfgCfuCfcUfuCfaGfuCfcG | 1489 |
| | | CfuGfdTsdT | | fgUfudTsdT | |
| 644 | 644-662 | agGfaGfcUfgCfcCfaUfgAfg | 1490 | UfUfuCfuCfaUfgGfgCfaGfcU | 1491 |
| | | AfaAfdTsdT | | fcCfudTsdT | |
| 665 | 665-683 | uaCfaGfgAfaAfuCfcUfgCfa | 1492 | CfCfaUfgCfaGfgAfuUfuCfcU | 1493 |
| | | UfgGfdTsdT | | fgUfadTsdT | |
| 668 | 668-686 | agGfaAfaUfcCfuGfcAfuGfg | 1494 | GfCfgCfcAfuGfcAfgGfaUfuU | 1495 |
| | | CfgCfdTsdT | | fcCfudTsdT | |
| 669 | 669-687 | ggAfaAfuCfcUfgCfaUfgGfc | 1496 | GfGfcGfcCfaUfgCfaGfgAfuU | 1497 |
| | | GfcCfdTsdT | | fuCfcdTsdT | |
| 670 | 670-688 | gaAfaUfcCfuGfcAfuGfgCfg | 1498 | CfGfgCfgCfcAfuGfcAfgGfaU | 1499 |
| | | CfcGfdTsdT | | fuUfcdTsdT | |
| 671 | 671-689 | aaAfuCfcUfgCfaUfgGfcGfc | 1500 | AfCfgGfcGfcCfaUfgCfaGfgA | 1501 |
| | | CfgUfdTsdT | | fuUfudTsdT | |
| 672 | 672-690 | aaUfcCfuGfcAfuGfgCfgCfc | 1502 | CfAfcGfgCfgCfcAfuGfcAfgG | 1503 |
| | | GfuGfdTsdT | | faUfudTsdT | |
| 674 | 674-692 | ucCfuGfcAfuGfgCfgCfcGfu | 1504 | CfGfcAfcGfgCfgCfcAfuGfcA | 1505 |
| | | GfcGfdTsdT | | fgGfadTsdT | |
| 676 | 676-694 | cuGfcAfuGfgCfgCfcGfuGfc | 1506 | AfCfcGfcAfcGfgCfgCfcAfuG | 1507 |
| | | GfgUfdTsdT | | fcAfgdTsdT | |
| 677 | 677-695 | ugCfaUfgGfcGfcCfgUfgCfg | 1508 | AfAfcCfgCfaCfgGfcGfcCfaUf | 1509 |
| | | GfuUfdTsdT | | gCfadTsdT | |
| 678 | 678-696 | gcAfuGfgCfgCfcGfuGfcGfg | 1510 | GfAfaCfcGfcAfcGfgCfgCfcA | 1511 |
| | | UfuCfdTsdT | | fuGfcdTsdT | |
| 680 | 680-698 | auGfgCfgCfcGfuGfcGfgUfu | 1512 | CfUfgAfaCfcGfcAfcGfgCfgC | 1513 |
| | | CfaGfdTsdT | | fcAfudTsdT | |
| 681 | 681-699 | ugGfcGfcCfgUfgCfgGfuUfc | 1514 | GfCfuGfaAfcCfgCfaCfgGfcG | 1515 |
| | | AfgCfdTsdT | | fcCfadTsdT | |
| 682 | 682-700 | ggCfgCfcGfuGfcGfgUfuCfa | 1516 | UfGfcUfgAfaCfcGfcAfcGfgC | 1517 |
| | | GfcAfdTsdT | | fgCfcdTsdT | |
| 683 | 683-701 | gcGfcCfgUfgCfgGfuUfcAfg | 1518 | UfUfgCfuGfaAfcCfgCfaCfgG | 1519 |
| | | CfaAfdTsdT | | fcGfcdTsdT | |
| 684 | 684-702 | cgCfcGfuGfcGfgUfuCfaGfc | 1520 | GfUfuGfcUfgAfaCfcGfcAfcG | 1521 |
| | | AfaCfdTsdT | | fgCfgdTsdT | |
| 685 | 685-703 | gcCfgUfgCfgGfuUfcAfgCfa | 1522 | UfGfuUfgCfuGfaAfcCfgCfaC | 1523 |
| | | AfcAfdTsdT | | fgGfcdTsdT | |
| 686 | 686-704 | ccGfuGfcGfgUfuCfaGfcAfa | 1524 | UfUfgUfuGfcUfgAfaCfcGfcA | 1525 |
| | | CfaAfdTsdT | | fcGfgdTsdT | |
| 688 | 688-706 | guGfcGfgUfuCfaGfcAfaCfa | 1526 | GfGfuUfgUfuGfcUfgAfaCfcG | 1527 |
| | | AfcCfdTsdT | | fcAfcdTsdT | |
| 690 | 690-708 | gcGfgUfuCfaGfcAfaCfaAfc | 1528 | AfGfgGfuUfgUfuGfcUfgAfaC | 1529 |
| | | CfcUfdTsdT | | fcGfcdTsdT | |
| 692 | 692-710 | ggUfuCfaGfcAfaCfaAfcCfc | 1530 | GfCfaGfgGfuUfgUfuGfcUfgA | 1531 |
| | | UfgCfdTsdT | | faCfcdTsdT | |
| 698 | 698-716 | gcAfaCfaAfcCfcUfgCfcCfu | 1532 | CfAfcAfgGfgCfaGfgGfuUfgU | 1533 |
| | | GfuGfdTsdT | | fuGfcdTsdT | |
| 700 | 700-718 | aaCfaAfcCfcUfgCfcCfuGfu | 1534 | UfGfcAfcAfgGfgCfaGfgGfuU | 1535 |
| | | GfcAfdTsdT | | fgUfudTsdT | |
| 719 | 719-737 | acGfuGfgAfgAfgCfaUfcCfa | 1536 | CfAfcUfgGfaUfgCfuCfuCfcA | 1537 |
| | | GfuGfdTsdT | | fcGfudTsdT | |
| 720 | 720-738 | cgUfgGfaGfaGfcAfuCfcAfg | 1538 | CfCfaCfuGfgAfuGfcUfcUfcC | 1539 |
| | | UfgGfdTsdT | | faCfgdTsdT | |
| 721 | 721-739 | guGfgAfgAfgCfaUfcCfaGfu | 1540 | GfCfcAfcUfgGfaUfgCfuCfuC | 1541 |
| | | GfgCfdTsdT | | fcAfcdTsdT | |
| 724 | 724-742 | gaGfaGfcAfuCfcAfgUfgGfc | 1542 | CfCfcGfcCfaCfuGfgAfuGfcU | 1543 |
| | | GfgGfdTsdT | | fc-UfcdTsdT | |
| 725 | 725-743 | agAfgCfaUfcCfaGfuGfgCfg | 1544 | UfCfcCfgCfcAfcUfgGfaUfgC | 1545 |
| | | GfgAfdTsdT | | fuCfudTsdT | |
| 726 | 726-744 | gaGfcAfuCfcAfgUfgGfcGfg | 1546 | GfUfcCfcGfcCfaCfuGfgAfuG | 1547 |
| | | GfaCfdTsdT | | fc-UfcdTsdT | |
| 733 | 733-751 | caGfuGfgCfgGfgAfcAfuAfg | 1548 | UfGfaCfuAfuGfuCfcCfgCfcA | 1549 |
| | | UfcAfdTsdT | | fcUfgdTsdT | |
| 734 | 734-752 | agUfgGfcGfgGfaCfaUfaGfu | 1550 | CfUfgAfcUfaUfgUfcCfcGfcC | 1551 |
| | | CfaGfdTsdT | | faCfudTsdT | |
| 736 | 736-754 | ugGfcGfgGfaCfaUfaGfuCfa | 1552 | UfGfcUfgAfcUfaUfgUfcCfcG | 1553 |
| | | GfcAfdTsdT | | fcCfadTsdT | |
| 737 | 737-755 | ggCfgGfgAfcAfuAfgUfcAfg | 1554 | CfUfgCfuGfaCfuAfuGfuCfcC | 1555 |
| | | CfaGfdTsdT | | fgCfcdTsdT | |
| 763 | 763-781 | cuCfaGfcAfaCfaUfgUfcGfa | 1556 | CfCfaUfcGfaCfaUfgUfuGfcU | 1557 |
| | | UfgGfdTsdT | | fgAfgdTsdT | |
| 765 | 765-783 | caGfcAfaCfaUfgUfcGfaUfg | 1558 | GfUfcCfaUfcGfaCfaUfgUfuG | 1559 |
| | | GfaCfdTsdT | | fcUfgdTsdT | |
| 766 | 766-784 | agCfaAfcAfuGfuCfgAfuGfg | 1560 | AfGfuCfcAfuCfgAfcAfuGfuU | 1561 |
| | | AfcUfdTsdT | | fgCfudTsdT | |
| 767 | 767-785 | gcAfaCfaUfgUfcGfaUfgGfa | 1562 | AfAfgUfcCfaUfcGfaCfaUfgU | 1563 |
| | | CfuUfdTsdT | | fuGfcdTsdT | |
| 769 | 769-787 | aaCfaUfgUfcGfaUfgGfaCfu | 1564 | GfGfaAfgUfcCfaUfcGfaCfaU | 1565 |
| | | UfcCfdTsdT | | fgUfudTsdT | |
| 770 | 770-788 | acAfuGfuCfgAfuGfgAfcUfu | 1566 | UfGfgAfaGfuCfcAfuCfgAfcA | 1567 |
| | | CfcAfdTsdT | | fuGfudTsdT | |
| 771 | 771-789 | caUfgUfcGfaUfgGfaCfuUfc | 1568 | CfUfgGfaAfgUfcCfaUfcGfaC | 1569 |
| | | CfaGfdTsdT | | faUfgdTsdT | |
| 772 | 772-790 | auGfuCfgAfuGfgAfcUfuCfc | 1570 | UfCfuGfgAfaGfuCfcAfuCfgA | 1571 |
| | | AfgAfdTsdT | | fcAfudTsdT | |
| 775 | 775-793 | ucGfaUfgGfaCfuUfcCfaGfa | 1572 | GfGfuUfcUfgGfaAfgUfcCfaU | 1573 |
| | | AfcCfdTsdT | | fcGfadTsdT | |
| 789 | 789-807 | gaAfcCfaCfcUfgGfgCfaGfc | 1574 | GfCfaGfcUfgCfcCfaGfgUfgG | 1575 |
| | | UfgCfdTsdT | | fuUfcdTsdT | |
| 798 | 798-816 | ggGfcAfgCfuGfcCfaAfaAfg | 1576 | AfCfaCfuUfuUfgGfcAfgCfuG | 1577 |
| | | UfgUfdTsdT | | fcCfcdTsdT | |
| 800 | 800-818 | gcAfgCfuGfcCfaAfaAfgUfg | 1578 | UfCfaCfaCfuUfuUfgGfcAfgC | 1579 |
| | | UfgAfdTsdT | | fuGfcdTsdT | |
| 805 | 805-823 | ugCfcAfaAfaGfuGfuGfaUfc | 1580 | UfUfgGfaUfcAfcAfcUfuUfuG | 1581 |
| | | CfaAfdTsdT | | fgCfadTsdT | |
| 806 | 806-824 | gcCfaAfaAfgUfgUfgAfuCfc | 1582 | CfUfuGfgAfuCfaCfaCfuUfuU | 1583 |
| | | AfaGfdTsdT | | fgGfcdTsdT | |
| 807 | 807-825 | ccAfaAfaGfuGfuGfaUfcCfa | 1584 | GfCfuUfgGfaUfcAfcAfcUfuU | 1585 |
| | | AfgCfdTsdT | | fuGfgdTsdT | |
| 810 | 810-828 | aaAfgUfgUfgAfuCfcAfaGfc | 1586 | AfCfaGfcUfuGfgAfuCfaCfaC | 1587 |
| | | UfgUfdTsdT | | fuUfudTsdT | |
| 814 | 814-832 | ugUfgAfuCfcAfaGfcUfgUfc | 1588 | UfGfgGfaCfaGfcUfuGfgAfuC | 1589 |
| | | CfcAfdTsdT | | faCfadTsdT | |
| 815 | 815-833 | guGfaUfcCfaAfgCfuGfuCfc | 1590 | UfUfgGfgAfcAfgCfuUfgGfaU | 1591 |
| | | CfaAfdTsdT | | fcAfcdTsdT | |
| 817 | 817-835 | gaUfcCfaAfgCfuGfuCfcCfa | 1592 | CfAfuUfgGfgAfcAfgCfuUfgG | 1593 |
| | | AfuGfdTsdT | | faUfcdTsdT | |
| 818 | 818-836 | auCfcAfaGfcUfgUfcCfcAfa | 1594 | CfCfaUfuGfgGfaCfaGfcUfuG | 1595 |
| | | UfgGfdTsdT | | fgAfudTsdT | |
| 819 | 819-837 | ucCfaAfgCfuGfuCfcCfaAfu | 1596 | CfCfcAfuUfgGfgAfcAfgCfuU | 1597 |
| | | GfgGfdTsdT | | fgGfadTsdT | |
| 820 | 820-838 | ccAfaGfcUfgUfcCfcAfaUfg | 1598 | UfCfcCfaUfuGfgGfaCfaGfcU | 1599 |
| | | GfgAfdTsdT | | fuGfgdTsdT | |
| 821 | 821-839 | caAfgCfuGfuCfcCfaAfuGfg | 1600 | CfUfcCfcAfuUfgGfgAfcAfgC | 1601 |
| | | GfaGfdTsdT | | fuUfgdTsdT | |
| 823 | 823-841 | agCfuGfuCfcCfaAfuGfgGfa | 1602 | AfGfcUfcCfcAfuUfgGfgAfcA | 1603 |
| | | GfcUfdTsdT | | fgCfudTsdT | |
| 826 | 826-844 | ugUfcCfcAfaUfgGfgAfgCfu | 1604 | AfGfcAfgCfuCfcCfaUfuGfgG | 1605 |
| | | GfcUfdTsdT | | faCfadTsdT | |
| 847 | 847-865 | ggUfgCfaGfgAfgAfgGfaGfa | 1606 | AfGfuUfcUfcCfuCfuCfcUfgC | 1607 |
| | | AfcUfdTsdT | | faCfcdTsdT | |
| 871 | 871-889 | aaAfcUfgAfcCfaAfaAfuCfa | 1608 | AfGfaUfgAfuUfuUfgGfuCfaG | 1609 |
| | | UfcUfdTsdT | | fuUfudTsdT | |
| 872 | 872-890 | aaCfuGfaCfcAfaAfaUfcAfu | 1610 | CfAfgAfuGfaUfuUfuGfgUfcA | 1611 |
| | | CfuGfdTsdT | | fgUfudTsdT | |
| 873 | 873-891 | acUfgAfcCfaAfaAfuCfaUfc | 1612 | AfCfaGfaUfgAfuUfuUfgGfuC | 1613 |
| | | UfgUfdTsdT | | faGfudTsdT | |
| 877 | 877-895 | acCfaAfaAfuCfaUfcUfgUfg | 1614 | GfGfgCfaCfaGfaUfgAfuUfuU | 1615 |
| | | CfcCfdTsdT | | fgGfudTsdT | |
| 878 | 878-896 | ccAfaAfaUfcAfuCfuGfuGfc | 1616 | UfGfgGfcAfcAfgAfuGfaUfuU | 1617 |
| | | CfcAfdTsdT | | fuGfgdTsdT | |
| 881 | 881-899 | aaAfuCfaUfcUfgUfgCfcCfa | 1618 | UfGfcUfgGfgCfaCfaGfaUfgA | 1619 |
| | | GfcAfdTsdT | | fuUfudTsdT | |
| 890 | 890-908 | guGfcCfcAfgCfaGfuGfcUfc | 1620 | CfCfgGfaGfcAfcUfgCfuGfgG | 1621 |
| | | CfgGfdTsdT | | fcAfcdTsdT | |
| 892 | 892-910 | gcCfcAfgCfaGfuGfcUfcCfg | 1622 | GfCfcCfgGfaGfcAfcUfgCfuG | 1623 |
| | | GfgCfdTsdT | | fgGfcdTsdT | |
| 929 | 929-947 | ccAfgUfgAfcUfgCfuGfcCfa | 1624 | UfUfgUfgGfcAfgCfaGfuCfaC | 1625 |
| | | CfaAfdTsdT | | fuGfgdTsdT | |
| 930 | 930-948 | caGfuGfaCfuGfcUfgCfcAfc | 1626 | GfUfuGfuGfgCfaGfcAfgUfcA | 1627 |
| | | AfaCfdTsdT | | fcUfgdTsdT | |
| 979 | 979-997 | gaGfaGfcGfaCfuGfcCfuGfg | 1628 | AfGfaCfcAfgGfcAfgUfcGfcU | 1629 |
| | | UfcUfdTsdT | | fc-UfcdTsdT | |
| 980 | 980-998 | agAfgCfgAfcUfgCfcUfgGfu | 1630 | CfAfgAfcCfaGfgCfaGfuCfgC | 1631 |
| | | CfuGfdTsdT | | fuCfudTsdT | |
| 981 | 981-999 | gaGfcGfaCfuGfcCfuGfgUfc | 1632 | GfCfaGfaCfcAfgGfcAfgUfcG | 1633 |
| | | UfgCfdTsdT | | fc-UfcdTsdT | |
| 982 | 982-1000 | agCfgAfcUfgCfcUfgGfuCfu | 1634 | GfGfcAfgAfcCfaGfgCfaGfuC | 1635 |
| | | GfcCfdTsdT | | fgCfudTsdT | |
| 983 | 983-1001 | gcGfaCfuGfcCfuGfgUfcUfg | 1636 | CfGfgCfaGfaCfcAfgGfcAfgU | 1637 |
| | | CfcGfdTsdT | | fcGfcdTsdT | |
| 984 | 984-1002 | cgAfcUfgCfcUfgGfuCfuGfc | 1638 | GfCfgGfcAfgAfcCfaGfgCfaG | 1639 |
| | | CfgCfdTsdT | | fuCfgdTsdT | |
| 989 | 989-1007 | gcCfuGfgUfcUfgCfcGfcAfa | 1640 | AfAfuUfuGfcGfgCfaGfaCfcA | 1641 |
| | | AfuUfdTsdT | | fgGfcdTsdT | |
| 990 | 990-1008 | ccUfgGfuCfuGfcCfgCfaAfa | 1642 | GfAfaUfuUfgCfgGfcAfgAfcC | 1643 |
| | | UfuCfdTsdT | | faGfgdTsdT | |
| 991 | 991-1009 | cuGfgUfcUfgCfcGfcAfaAfu | 1644 | GfGfaAfuUfuGfcGfgCfaGfaC | 1645 |
| | | UfcCfdTsdT | | fcAfgdTsdT | |
| 992 | 992-1010 | ugGfuCfuGfcCfgCfaAfaUfu | 1646 | CfGfgAfaUfuUfgCfgGfcAfgA | 1647 |
| | | CfcGfdTsdT | | fcCfadTsdT | |
| 994 | 994-1012 | guCfuGfcCfgCfaAfaUfuCfc | 1648 | CfUfcGfgAfaUfuUfgCfgGfcA | 1649 |
| | | GfaGfdTsdT | | fgAfcdTsdT | |
| 995 | 995-1013 | ucUfgCfcGfcAfaAfuUfcCfg | 1650 | UfCfuCfgGfaAfutifuGfcGfgC | 1651 |
| | | AfgAfdTsdT | | faGfadTsdT | |
| 996 | 996-1014 | cuGfcCfgCfaAfaUfuCfcGfa | 1652 | GfUfcUfcGfgAfaUfuUfgCfgG | 1653 |
| | | GfaCfdTsdT | | fcAfgdTsdT | |
| 997 | 997-1015 | ugCfcGfcAfaAfuUfcCfgAfg | 1654 | CfGfuCfuCfgGfaAfuUfuGfcG | 1655 |
| | | AfcGfdTsdT | | fgCfadTsdT | |
| 999 | 999-1017 | ccGfcAfaAfuUfcCfgAfgAfc | 1656 | UfUfcGfuCfuCfgGfaAfutifuG | 1657 |
| | | GfaAfdTsdT | | fcGfgdTsdT | |
| 1004 | 1004-1022 | aaUfuCfcGfaGfaCfgAfaGfc | 1658 | GfUfgGfcUfuCfgUfcUfcGfgA | 1659 |
| | | CfaCfdTsdT | | faUfudTsdT | |
| 1005 | 1005-1023 | auUfcCfgAfgAfcGfaAfgCfc | 1660 | CfGfuGfgCfuUfcGfuCfuCfgG | 1661 |
| | | AfcGfdTsdT | | faAfudTsdT | |
| 1006 | 1006-1024 | uuCfcGfaGfaCfgAfaGfcCfa | 1662 | AfCfgUfgGfcUfuCfgUfcUfcG | 1663 |
| | | CfgUfdTsdT | | fgAfadTsdT | |
| 1007 | 1007-1025 | ucCfgAfgAfcGfaAfgCfcAfc | 1664 | CfAfcGfuGfgCfuUfcGfuCfuC | 1665 |
| | | GfuGfdTsdT | | fgGfadTsdT | |
| 1008 | 1008-1026 | ccGfaGfaCfgAfaGfcCfaCfg | 1666 | GfCfaCfgUfgGfc-UfuCfgUfcU | 1667 |
| | | UfgCfdTsdT | | fcGfgdTsdT | |
| 1010 | 1010-1028 | gaGfaCfgAfaGfcCfaCfgUfg | 1668 | UfUfgCfaCfgUfgGfcUfuCfgU | 1669 |
| | | CfaAfdTsdT | | fcUfcdTsdT | |
| 1013 | 1013-1031 | acGfaAfgCfcAfcGfuGfcAfa | 1670 | UfCfcUfuGfcAfcGfuGfgCfuU | 1671 |
| | | GfgAfdTsdT | | fcGfudTsdT | |
| 1014 | 1014-1032 | cgAfaGfcCfaCfgUfgCfaAfg | 1672 | GfUfcCfuUfgCfaCfgUfgGfcU | 1673 |
| | | GfaCfdTsdT | | fuCfgdTsdT | |
| 1015 | 1015-1033 | gaAfgCfcAfcGfuGfcAfaGfg | 1674 | UfGfuCfcUfuGfcAfcGfuGfgC | 1675 |
| | | AfcAfdTsdT | | fuUfcdTsdT | |
| 1016 | 1016-1034 | aaGfcCfaCfgUfgCfaAfgGfa | 1676 | GfUfgUfcCfuUfgCfaCfgUfgG | 1677 |
| | | CfaCfdTsdT | | fcUfudTsdT | |
| 1040 | 1040-1058 | ccCfcAfcUfcAfuGfcUfcUfa | 1678 | UfUfgUfaGfaGfcAfuGfaGfuG | 1679 |
| | | CfaAfdTsdT | | fgGfgdTsdT | |
| 1042 | 1042-1060 | ccAfcUfcAfuGfcUfcUfaCfa | 1680 | GfGfuUfgUfaGfaGfcAfuGfaG | 1681 |
| | | AfcCfdTsdT | | fuGfgdTsdT | |
| 1044 | 1044-1062 | acUfcAfuGfcUfcUfaCfaAfc | 1682 | GfGfgGfuUfgUfaGfaGfcAfuG | 1683 |
| | | CfcCfdTsdT | | faGfudTsdT | |
| 1047 | 1047-1065 | caUfgCfuCfuAfcAfaCfcCfc | 1684 | GfGfuGfgGfgUfuGfuAfgAfg | 1685 |
| | | AfcCfdTsdT | | CfaUfgdTsdT | |
| 1071 | 1071-1089 | ccAfgAfuGfgAfuGfuGfaAfc | 1686 | GfGfgGfuUfcAfcAfuCfcAfuC | 1687 |
| | | CfcCfdTsdT | | fuGfgdTsdT | |
| 1073 | 1073-1091 | agAfuGfgAfuGfuGfaAfcCfc | 1688 | UfCfgGfgGfuUfcAfcAfuCfcA | 1689 |
| | | CfgAfdTsdT | | fuCfudTsdT | |
| 1074 | 1074-1092 | gaUfgGfaUfgUfgAfaCfcCfc | 1690 | CfUfcGfgGfgUfuCfaCfaUfcC | 1691 |
| | | GfaGfdTsdT | | faUfcdTsdT | |
| 1075 | 1075-1093 | auGfgAfuGfuGfaAfcCfcCfg | 1692 | CfCfuCfgGfgGfuUfcAfcAfuC | 1693 |
| | | AfgGfdTsdT | | fcAfudTsdT | |
| 1077 | 1077-1095 | ggAfuGfuGfaAfcCfcCfgAfg | 1694 | GfCfcCfuCfgGfgGfuUfcAfcA | 1695 |
| | | GfgCfdTsdT | | fuCfcdTsdT | |
| 1078 | 1078-1096 | gaUfgUfgAfaCfcCfcGfaGfg | 1696 | UfGfcCfcUfcGfgGfgUfuCfaC | 1697 |
| | | GfcAfdTsdT | | faUfcdTsdT | |
| 1080 | 1080-1098 | ugUfgAfaCfcCfcGfaGfgGfc | 1698 | UfUfuGfcCfcUfcGfgGfgUfuC | 1699 |
| | | AfaAfdTsdT | | faCfadTsdT | |
| 1084 | 1084-1102 | aaCfcCfcGfaGfgGfcAfaAfu | 1700 | UfGfuAfuUfuGfcCfcUfcGfgG | 1701 |
| | | AfcAfdTsdT | | fgUfudTsdT | |
| 1085 | 1085-1103 | acCfcCfgAfgGfgCfaAfaUfa | 1702 | CfUfgUfaUfuUfgCfcCfuCfgG | 1703 |
| | | CfaGfdTsdT | | fgGfudTsdT | |
| 1087 | 1087-1105 | ccCfgAfgGfgCfaAfaUfaCfa | 1704 | AfGfcUfgUfaUfuUfgCfcCfuC | 1705 |
| | | GfcUfdTsdT | | fgGfgdTsdT | |
| 1088 | 1088-1106 | ccGfaGfgGfcAfaAfuAfcAfg | 1706 | AfAfgCfuGfuAfuUfuGfcCfcU | 1707 |
| | | CfuUfdTsdT | | fcGfgdTsdT | |
| 1089 | 1089-1107 | cgAfgGfgCfaAfaUfaCfaGfc | 1708 | AfAfaGfcUfgUfaUfuUfgCfcC | 1709 |
| | | UfuUfdTsdT | | fuCfgdTsdT | |
| 1096 | 1096-1114 | aaAfuAfcAfgCfuUfuGfgUfg | 1710 | UfGfgCfaCfcAfaAfgCfuGfuA | 1711 |
| | | CfcAfdTsdT | | fuUfudTsdT | |
| 1097 | 1097-1115 | aaUfaCfaGfcUfuUfgGfuGfc | 1712 | GfUfgGfcAfcCfaAfaGfcUfgU | 1713 |
| | | CfaCfdTsdT | | faUfudTsdT | |
| 1098 | 1098-1116 | auAfcAfgCfuUfuGfgUfgCfc | 1714 | GfGfuGfgCfaCfcAfaAfgCfuG | 1715 |
| | | AfcCfdTsdT | | fuAfudTsdT | |
| 1104 | 1104-1122 | cuUfuGfgUfgCfcAfcCfuGfc | 1716 | CfAfcGfcAfgGfuGfgCfaCfcA | 1717 |
| | | GfuGfdTsdT | | faAfgdTsdT | |
| 1106 | 1106-1124 | uuGfgUfgCfcAfcCfuGfcGfu | 1718 | UfUfcAfcGfcAfgGfuGfgCfaC | 1719 |
| | | GfaAfdTsdT | | fcAfadTsdT | |
| 1112 | 1112-1130 | ccAfcCfuGfcGfuGfaAfgAfa | 1720 | CfAfcUfuCfuUfcAfcGfcAfgG | 1721 |
| | | GfuGfdTsdT | | fuGfgdTsdT | |
| 1116 | 1116-1134 | cuGfcGfuGfaAfgAfaGfuGfu | 1722 | GfGfgAfcAfcUfuCfuUfcAfcG | 1723 |
| | | CfcCfdTsdT | | fcAfgdTsdT | |
| 1117 | 1117-1135 | ugCfgUfgAfaGfaAfgUfgUfc | 1724 | GfGfgGfaCfaCfuUfcUfuCfaC | 1725 |
| | | CfcCfdTsdT | | fgCfadTsdT | |
| 1118 | 1118-1136 | gcGfuGfaAfgAfaGfuGfuCfc | 1726 | CfGfgGfgAfcAfcUfuCfuUfcA | 1727 |
| | | CfcGfdTsdT | | fcGfcdTsdT | |
| 1119 | 1119-1137 | cgUfgAfaGfaAfgUfgUfcCfc | 1728 | AfCfgGfgGfaCfaCfuUfcUfuC | 1729 |
| | | CfgUfdTsdT | | faCfgdTsdT | |
| 1120 | 1120-1138 | guGfaAfgAfaGfuGfuCfcCfc | 1730 | UfAfcGfgGfgAfcAfcUfuCfuU | 1731 |
| | | GfuAfdTsdT | | fcAfcdTsdT | |
| 1121 | 1121-1139 | ugAfaGfaAfgUfgUfcCfcCfg | 1732 | UfUfaCfgGfgGfaCfaCfuUfcU | 1733 |
| | | UfaAfdTsdT | | fuCfadTsdT | |
| 1122 | 1122-1140 | gaAfgAfaGfuGfuCfcCfcGfu | 1734 | AfUfuAfcGfgGfgAfcAfcUfuC | 1735 |
| | | AfaUfdTsdT | | fuUfcdTsdT | |
| 1123 | 1123-1141 | aaGfaAfgUfgUfcCfcCfgUfa | 1736 | AfAfuUfaCfgGfgGfaCfaCfuU | 1737 |
| | | AfuUfdTsdT | | fcUfudTsdT | |
| 1124 | 1124-1142 | agAfaGfuGfuCfcCfcGfuAfa | 1738 | UfAfaUfuAfcGfgGfgAfcAfcU | 1739 |
| | | UfuAfdTsdT | | fuCfudTsdT | |
| 1125 | 1125-1143 | gaAfgUfgUfcCfcCfgUfaAfu | 1740 | AfUfaAfuUfaCfgGfgGfaCfaC | 1741 |
| | | UfaUfdTsdT | | fuUfcdTsdT | |
| 1126 | 1126-1144 | aaGfuGfuCfcCfcGfuAfaUfu | 1742 | CfAfuAfaUfuAfcGfgGfgAfcA | 1743 |
| | | AfuGfdTsdT | | fcUfudTsdT | |
| 1127 | 1127-1145 | agUfgUfcCfcCfgUfaAfuUfa | 1744 | AfCfaUfaAfuUfaCfgGfgGfaC | 1745 |
| | | UfgUfdTsdT | | faCfudTsdT | |
| 1128 | 1128-1146 | guGfuCfcCfcGfuAfaUfuAfu | 1746 | CfAfcAfuAfaUfuAfcGfgGfgA | 1747 |
| | | GfuGfdTsdT | | fcAfcdTsdT | |
| 1129 | 1129-1147 | ugUfcCfcCfgUfaAfuUfaUfg | 1748 | CfCfaCfaUfaAfuUfaCfgGfgG | 1749 |
| | | UfgGfdTsdT | | faCfadTsdT | |
| 1130 | 1130-1148 | guCfcCfcGfuAfaUfuAfuGfu | 1750 | AfCfcAfcAfuAfaUfuAfcGfgG | 1751 |
| | | GfgUfdTsdT | | fgAfcdTsdT | |
| 1132 | 1132-1150 | ccCfcGfuAfaUfuAfuGfuGfg | 1752 | UfCfaCfcAfcAfuAfaUfuAfcG | 1753 |
| | | UfgAfdTsdT | | fgGfgdTsdT | |
| 1134 | 1134-1152 | ccGfuAfaUfuAfuGfuGfgUfg | 1754 | UfGfuCfaCfcAfcAfuAfaUfuA | 1755 |
| | | AfcAfdTsdT | | fcGfgdTsdT | |
| 1136 | 1136-1154 | guAfaUfuAfuGfuGfgUfgAf | 1756 | UfCfuGfuCfaCfcAfcAfuAfaU | 1757 |
| | | cAfgAfdTsdT | | fuAfcdTsdT | |
| 1137 | 1137-1155 | uaAfuUfaUfgUfgGfuGfaCfa | 1758 | AfUfcUfgUfcAfcCfaCfaUfaA | 1759 |
| | | GfaUfdTsdT | | fuUfadTsdT | |
| 1138 | 1138-1156 | aaUfuAfuGfuGfgUfgAfcAfg | 1760 | GfAfuCfuGfuCfaCfcAfcAfuA | 1761 |
| | | AfuCfdTsdT | | faUfudTsdT | |
| 1139 | 1139-1157 | auUfaUfgUfgGfuGfaCfaGfa | 1762 | UfGfaUfcUfgUfcAfcCfaCfaU | 1763 |
| | | UfcAfdTsdT | | faAfudTsdT | |
| 1140 | 1140-1158 | uuAfuGfuGfgUfgAfcAfgAf | 1764 | GfUfgAfuCfuGfuCfaCfcAfcA | 1765 |
| | | uCfaCfdTsdT | | fuAfadTsdT | |
| 1142 | 1142-1160 | auGfuGfgUfgAfcAfgAfuCfa | 1766 | CfCfgUfgAfuCfuGfuCfaCfcA | 1767 |
| | | CfgGfdTsdT | | fcAfudTsdT | |
| 1145 | 1145-1163 | ugGfuGfaCfaGfaUfcAfcGfg | 1768 | GfAfgCfcGfuGfaUfcUfgUfcA | 1769 |
| | | CfuCfdTsdT | | fcCfadTsdT | |
| 1147 | 1147-1165 | guGfaCfaGfaUfcAfcGfgCfu | 1770 | AfCfgAfgCfcGfuGfaUfcUfgU | 1771 |
| | | CfgUfdTsdT | | fcAfcdTsdT | |
| 1148 | 1148-1166 | ugAfcAfgAfuCfaCfgGfcUfc | 1772 | CfAfcGfaGfcCfgUfgAfuCfuG | 1773 |
| | | GfuGfdTsdT | | fuCfadTsdT | |
| 1149 | 1149-1167 | gaCfaGfaUfcAfcGfgCfuCfg | 1774 | GfCfaCfgAfgCfcGfuGfaUfcU | 1775 |
| | | UfgCfdTsdT | | fgUfcdTsdT | |
| 1150 | 1150-1168 | acAfgAfuCfaCfgGfcUfcGfu | 1776 | CfGfcAfcGfaGfcCfgUfgAfuC | 1777 |
| | | GfcGfdTsdT | | fuGfudTsdT | |
| 1151 | 1151-1169 | caGfaUfcAfcGfgCfuCfgUfg | 1778 | AfCfgCfaCfgAfgCfcGfuGfaU | 1779 |
| | | CfgUfdTsdT | | fcUfgdTsdT | |
| 1152 | 1152-1170 | agAfuCfaCfgGfcUfcGfuGfc | 1780 | GfAfcGfcAfcGfaGfcCfgUfgA | 1781 |
| | | GfuCfdTsdT | | fuCfudTsdT | |
| 1153 | 1153-1171 | gaUfcAfcGfgCfuCfgUfgCfg | 1782 | GfGfaCfgCfaCfgAfgCfcGfuG | 1783 |
| | | UfcCfdTsdT | | faUfcdTsdT | |
| 1154 | 1154-1172 | auCfaCfgGfcUfcGfuGfcGfu | 1784 | CfGfgAfcGfcAfcGfaGfcCfgU | 1785 |
| | | CfcGfdTsdT | | fgAfudTsdT | |
| 1155 | 1155-1173 | ucAfcGfgCfuCfgUfgCfgUfc | 1786 | UfCfgGfaCfgCfaCfgAfgCfcG | 1787 |
| | | CfgAfdTsdT | | fuGfadTsdT | |
| 1156 | 1156-1174 | caCfgGfcUfcGfuGfcGfuCfc | 1788 | CfUfcGfgAfcGfcAfcGfaGfcC | 1789 |
| | | GfaGfdTsdT | | fgUfgdTsdT | |
| 1157 | 1157-1175 | acGfgCfuCfgUfgCfgUfcCfg | 1790 | GfCfuCfgGfaCfgCfaCfgAfgC | 1791 |
| | | AfgCfdTsdT | | fcGfudTsdT | |
| 1160 | 1160-1178 | gcUfcGfuGfcGfuCfcGfaGfc | 1792 | CfAfgGfcUfcGfgAfcGfcAfcG | 1793 |
| | | CfuGfdTsdT | | faGfcdTsdT | |
| 1200 | 1200-1218 | ggAfgGfaAfgAfcGfgCfgUfc | 1794 | GfCfgGfaCfgCfcGfuCfuUfcC | 1795 |
| | | CfgCfdTsdT | | fuCfcdTsdT | |
| 1201 | 1201-1219 | gaGfgAfaGfaCfgGfcGfuCfc | 1796 | UfGfcGfgAfcGfcCfgUfcUfuC | 1797 |
| | | GfcAfdTsdT | | fcUfcdTsdT | |
| 1203 | 1203-1221 | ggAfaGfaCfgGfcGfuCfcGfc | 1798 | CfUfuGfcGfgAfcGfcCfgUfcU | 1799 |
| | | AfaGfdTsdT | | fuCfcdTsdT | |
| 1204 | 1204-1222 | gaAfgAfcGfgCfgUfcCfgCfa | 1800 | AfCfuUfgCfgGfaCfgCfcGfuC | 1801 |
| | | AfgUfdTsdT | | fuUfcdTsdT | |
| 1205 | 1205-1223 | aaGfaCfgGfcGfuCfcGfcAfa | 1802 | CfAfcUfuGfcGfgAfcGfcCfgU | 1803 |
| | | GfuGfdTsdT | | fcUfudTsdT | |
| 1207 | 1207-1225 | gaCfgGfcGfuCfcGfcAfaGfu | 1804 | UfAfcAfcUfuGfcGfgAfcGfcC | 1805 |
| | | GfuAfdTsdT | | fgUfcdTsdT | |
| 1208 | 1208-1226 | acGfgCfgUfcCfgCfaAfgUfg | 1806 | UfUfaCfaCfuUfgCfgGfaCfgC | 1807 |
| | | UfaAfdTsdT | | fcGfudTsdT | |
| 1211 | 1211-1229 | gcGfuCfcGfcAfaGfuGfuAfa | 1808 | UfUfcUfuAfcAfcUfuGfcGfgA | 1809 |
| | | GfaAfdTsdT | | fcGfcdTsdT | |
| 1212 | 1212-1230 | cgUfcCfgCfaAfgUfgUfaAfg | 1810 | CfUfuCfuUfaCfaCfuUfgCfgG | 1811 |
| | | AfaGfdTsdT | | faCfgdTsdT | |
| 1213 | 1213-1231 | guCfcGfcAfaGfuGfuAfaGfa | 1812 | AfCfuUfcUfuAfcAfcUfuGfcG | 1813 |
| | | AfgUfdTsdT | | fgAfcdTsdT | |
| 1214 | 1214-1232 | ucCfgCfaAfgUfgUfaAfgAfa | 1814 | CfAfcUfuCfuUfaCfaCfuUfgC | 1815 |
| | | GfuGfdTsdT | | fgGfadTsdT | |
| 1215 | 1215-1233 | ccGfcAfaGfuGfuAfaGfaAfg | 1816 | GfCfaCfuUfcUfuAfcAfcUfuG | 1817 |
| | | UfgCfdTsdT | | fcGfgdTsdT | |
| 1216 | 1216-1234 | cgCfaAfgUfgUfaAfgAfaGfu | 1818 | CfGfcAfcUfuCfuUfaCfaCfuU | 1819 |
| | | GfcGfdTsdT | | fgCfgdTsdT | |
| 1217 | 1217-1235 | gcAfaGfuGfuAfaGfaAfgUfg | 1820 | UfCfgCfaCfuUfcUfuAfcAfcU | 1821 |
| | | CfgAfdTsdT | | fuGfcdTsdT | |
| 1219 | 1219-1237 | aaGfuGfuAfaGfaAfgUfgCfg | 1822 | CfUfuCfgCfaCfuUfcUfuAfcA | 1823 |
| | | AfaGfdTsdT | | fcUfudTsdT | |
| 1220 | 1220-1238 | agUfgUfaAfgAfaGfuGfcGfa | 1824 | CfCfuUfcGfcAfcUfuCfuUfaC | 1825 |
| | | AfgGfdTsdT | | faCfudTsdT | |
| 1221 | 1221-1239 | guGfuAfaGfaAfgUfgCfgAfa | 1826 | CfCfcUfuCfgCfaCfuUfcUfuA | 1827 |
| | | GfgGfdTsdT | | fcAfcdTsdT | |
| 1222 | 1222-1240 | ugUfaAfgAfaGfuGfcGfaAfg | 1828 | GfCfcCfuUfcGfcAfcUfuCfuU | 1829 |
| | | GfgCfdTsdT | | faCfadTsdT | |
| 1223 | 1223-1241 | guAfaGfaAfgUfgCfgAfaGfg | 1830 | GfGfcCfcUfuCfgCfaCfuUfcU | 1831 |
| | | GfcCfdTsdT | | fuAfcdTsdT | |
| 1224 | 1224-1242 | uaAfgAfaGfuGfcGfaAfgGfg | 1832 | AfGfgCfcCfuUfcGfcAfcUfuC | 1833 |
| | | CfcUfdTsdT | | fuUfadTsdT | |
| 1225 | 1225-1243 | aaGfaAfgUfgCfgAfaGfgGfc | 1834 | AfAfgGfcCfcUfuCfgCfaCfuU | 1835 |
| | | CfuUfdTsdT | | fcUfudTsdT | |
| 1226 | 1226-1244 | agAfaGfuGfcGfaAfgGfgCfc | 1836 | CfAfaGfgCfcCfuUfcGfcAfcU | 1837 |
| | | UfuGfdTsdT | | fuCfudTsdT | |
| 1229 | 1229-1247 | agUfgCfgAfaGfgGfcCfuUfg | 1838 | CfGfgCfaAfgGfcCfcUfuCfgC | 1839 |
| | | CfcGfdTsdT | | faCfudTsdT | |
| 1230 | 1230-1248 | guGfcGfaAfgGfgCfcUfuGfc | 1840 | GfCfgGfcAfaGfgCfcCfuUfcG | 1841 |
| | | CfgCfdTsdT | | fcAfcdTsdT | |
| 1231 | 1231-1249 | ugCfgAfaGfgGfcCfuUfgCfc | 1842 | UfGfcGfgCfaAfgGfcCfcUfuC | 1843 |
| | | GfcAfdTsdT | | fgCfadTsdT | |
| 1232 | 1232-1250 | gcGfaAfgGfgCfcUfuGfcCfg | 1844 | UfUfgCfgGfcAfaGfgCfcCfuU | 1845 |
| | | CfaAfdTsdT | | fcGfcdTsdT | |
| 1233 | 1233-1251 | cgAfaGfgGfcCfuUfgCfcGfc | 1846 | UfUfuGfcGfgCfaAfgGfcCfcU | 1847 |
| | | AfaAfdTsdT | | fuCfgdTsdT | |
| 1235 | 1235-1253 | aaGfgGfcCfuUfgCfcGfcAfa | 1848 | AfCfuUfuGfcGfgCfaAfgGfcC | 1849 |
| | | AfgUfdTsdT | | fcUfudTsdT | |
| 1236 | 1236-1254 | agGfgCfcUfuGfcCfgCfaAfa | 1850 | CfAfcUfuUfgCfgGfcAfaGfgC | 1851 |
| | | GfuGfdTsdT | | fcCfudTsdT | |
| 1237 | 1237-1255 | ggGfcCfuUfgCfcGfcAfaAfg | 1852 | AfCfaCfuUfuGfcGfgCfaAfgG | 1853 |
| | | UfgUfdTsdT | | fcCfcdTsdT | |
| 1238 | 1238-1256 | ggCfcUfuGfcCfgCfaAfaGfu | 1854 | CfAfcAfcUfuUfgCfgGfcAfaG | 1855 |
| | | GfuGfdTsdT | | fgCfcdTsdT | |
| 1239 | 1239-1257 | gcCfuUfgCfcGfcAfaAfgUfg | 1856 | AfCfaCfaCfuUfuGfcGfgCfaA | 1857 |
| | | UfgUfdTsdT | | fgGfcdTsdT | |
| 1241 | 1241-1259 | cuUfgCfcGfcAfaAfgUfgUfg | 1858 | UfUfaCfaCfaCfuUfuGfcGfgC | 1859 |
| | | UfaAfdTsdT | | faAfgdTsdT | |
| 1261 | 1261-1279 | ggAfaUfaGfgUfaUfuGfgUfg | 1860 | AfUfuCfaCfcAfaUfaCfcUfaUf | 1861 |
| | | AfaUfdTsdT | | uCfcdTsdT | |
| 1262 | 1262-1280 | gaAfuAfgGfuAfuUfgGfuGf | 1862 | AfAfuUfcAfcCfaAfuAfcCfuA | 1863 |
| | | aAfuUfdTsdT | | fuUfcdTsdT | |
| 1263 | 1263-1281 | aaUfaGfgUfaUfuGfgUfgAfa | 1864 | AfAfaUfuCfaCfcAfaUfaCfcUf | 1865 |
| | | UfuUfdTsdT | | aUfudTsdT | |
| 1264 | 1264-1282 | auAfgGfuAfuUfgGfuGfaAf | 1866 | UfAfaAfuUfcAfcCfaAfuAfcC | 1867 |
| | | uUfuAfdTsdT | | fuAfudTsdT | |
| 1266 | 1266-1284 | agGfuAfuUfgGfuGfaAfuUf | 1868 | UfUfuAfaAfuUfcAfcCfaAfuA | 1869 |
| | | uAfaAfdTsdT | | fcCfudTsdT | |
| 1267 | 1267-1285 | ggUfaUfuGfgUfgAfaUfuUfa | 1870 | CfUfuUfaAfaUfuCfaCfcAfaU | 1871 |
| | | AfaGfdTsdT | | faCfcdTsdT | |
| 1289 | 1289-1307 | caCfuCfuCfcAfuAfaAfuGfc | 1872 | GfUfaGfcAfuUfuAfuGfgAfg | 1873 |
| | | UfaCfdTsdT | | AfgUfgdTsdT | |
| 1313 | 1313-1331 | uuAfaAfcAfcUfuCfaAfaAfa | 1874 | CfAfgUfuUfuUfgAfaGfuGfu | 1875 |
| | | CfuGfdTsdT | | UfuAfadTsdT | |
| 1320 | 1320-1338 | cuUfcAfaAfaAfcUfgCfaCfc | 1876 | GfGfaGfgUfgCfaGfuUfuUfuG | 1877 |
| | | UfcCfdTsdT | | faAfgdTsdT | |
| 1321 | 1321-1339 | uuCfaAfaAfaCfuGfcAfcCfu | 1878 | UfGfgAfgGfuGfcAfgUfuUfu | 1879 |
| | | CfcAfdTsdT | | UfgAfadTsdT | |
| 1322 | 1322-1340 | ucAfaAfaAfcUfgCfaCfcUfc | 1880 | AfUfgGfaGfgUfgCfaGfuUfuU | 1881 |
| | | CfaUfdTsdT | | fuGfadTsdT | |
| 1323 | 1323-1341 | caAfaAfaCfuGfcAfcCfuCfc | 1882 | GfAfuGfgAfgGfuGfcAfgUfu | 1883 |
| | | AfuCfdTsdT | | UfuUfgdTsdT | |
| 1324 | 1324-1342 | aaAfaAfcUfgCfaCfcUfcCfa | 1884 | UfGfaUfgGfaGfgUfgCfaGfuU | 1885 |
| | | UfcAfdTsdT | | fuUfudTsdT | |
| 1328 | 1328-1346 | acUfgCfaCfcUfcCfaUfcAfg | 1886 | CfCfaCfuGfaUfgGfaGfgUfgC | 1887 |
| | | UfgGfdTsdT | | faGfudTsdT | |
| 1332 | 1332-1350 | caCfcUfcCfaUfcAfgUfgGfc | 1888 | AfUfcGfcCfaCfuGfaUfgGfaG | 1889 |
| | | GfaUfdTsdT | | fgUfgdTsdT | |
| 1333 | 1333-1351 | acCfuCfcAfuCfaGfuGfgCfg | 1890 | GfAfuCfgCfcAfcUfgAfuGfgA | 1891 |
| | | AfuCfdTsdT | | fgGfudTsdT | |
| 1335 | 1335-1353 | cuCfcAfuCfaGfuGfgCfgAfu | 1892 | GfAfgAfuCfgCfcAfcUfgAfuG | 1893 |
| | | CfuCfdTsdT | | fgAfgdTsdT | |
| 1338 | 1338-1356 | caUfcAfgUfgGfcGfaUfcUfc | 1894 | GfUfgGfaGfaUfcGfcCfaCfuG | 1895 |
| | | CfaCfdTsdT | | faUfgdTsdT | |
| 1344 | 1344-1362 | ugGfcGfaUfcUfcCfaCfaUfc | 1896 | CfAfgGfaUfgUfgGfaGfaUfcG | 1897 |
| | | CfuGfdTsdT | | fcCfadTsdT | |
| 1345 | 1345-1363 | ggCfgAfuCfuCfcAfcAfuCfc | 1898 | GfCfaGfgAfuGfuGfgAfgAfuC | 1899 |
| | | UfgCfdTsdT | | fgCfcdTsdT | |
| 1346 | 1346-1364 | gcGfaUfcUfcCfaCfaUfcCfu | 1900 | GfGfcAfgGfaUfgUfgGfaGfaU | 1901 |
| | | GfcCfdTsdT | | fcGfcdTsdT | |
| 1347 | 1347-1365 | cgAfuCfuCfcAfcAfuCfcUfg | 1902 | CfGfgCfaGfgAfuGfuGfgAfgA | 1903 |
| | | CfcGfdTsdT | | fuCfgdTsdT | |
| 1348 | 1348-1366 | gaUfcUfcCfaCfaUfcCfuGfc | 1904 | CfCfgGfcAfgGfaUfgUfgGfaG | 1905 |
| | | CfgGfdTsdT | | faUfcdTsdT | |
| 1353 | 1353-1371 | ccAfcAfuCfcUfgCfcGfgUfg | 1906 | UfGfcCfaCfcGfgCfaGfgAfuG | 1907 |
| | | GfcAfdTsdT | | fuGfgdTsdT | |
| 1354 | 1354-1372 | caCfaUfcCfuGfcCfgGfuGfg | 1908 | AfUfgCfcAfcCfgGfcAfgGfaU | 1909 |
| | | CfaUfdTsdT | | fgUfgdTsdT | |
| 1355 | 1355-1373 | acAfuCfcUfgCfcGfgUfgGfc | 1910 | AfAfuGfcCfaCfcGfgCfaGfgA | 1911 |
| | | AfuUfdTsdT | | fuGfudTsdT | |
| 1357 | 1357-1375 | auCfcUfgCfcGfgUfgGfcAfu | 1912 | UfAfaAfuGfcCfaCfcGfgCfaG | 1913 |
| | | UfuAfdTsdT | | fgAfudTsdT | |
| 1360 | 1360-1378 | cuGfcCfgGfuGfgCfaUfuUfa | 1914 | CfCfcUfaAfaUfgCfcAfcCfgGf | 1915 |
| | | GfgGfdTsdT | | cAfgdTsdT | |
| 1361 | 1361-1379 | ugCfcGfgUfgGfcAfuUfuAfg | 1916 | CfCfcCfuAfaAfuGfcCfaCfcGf | 1917 |
| | | GfgGfdTsdT | | gCfadTsdT | |
| 1362 | 1362-1380 | gcCfgGfuGfgCfaUfuUfaGfg | 1918 | AfCfcCfcUfaAfaUfgCfcAfcCf | 1919 |
| | | GfgUfdTsdT | | gGfcdTsdT | |
| 1363 | 1363-1381 | ccGfgUfgGfcAfuUfuAfgGfg | 1920 | CfAfcCfcCfuAfaAfuGfcCfaCf | 1921 |
| | | GfuGfdTsdT | | cGfgdTsdT | |
| 1366 | 1366-1384 | guGfgCfaUfuUfaGfgGfgUfg | 1922 | AfGfuCfaCfcCfcUfaAfaUfgCf | 1923 |
| | | AfcUfdTsdT | | cAfcdTsdT | |
| 1369 | 1369-1387 | gcAfuUfuAfgGfgGfuGfaCfu | 1924 | AfGfgAfgUfcAfcCfcCfuAfaA | 1925 |
| | | CfcUfdTsdT | | fuGfcdTsdT | |
| 1370 | 1370-1388 | caUfuUfaGfgGfgUfgAfcUfc | 1926 | AfAfgGfaGfuCfaCfcCfcUfaA | 1927 |
| | | CfuUfdTsdT | | faUfgdTsdT | |
| 1371 | 1371-1389 | auUfuAfgGfgGfuGfaCfuCfc | 1928 | GfAfaGfgAfgUfcAfcCfcCfuA | 1929 |
| | | UfuCfdTsdT | | faAfudTsdT | |
| 1372 | 1372-1390 | uuUfaGfgGfgUfgAfcUfcCfu | 1930 | UfGfaAfgGfaGfuCfaCfcCfcU | 1931 |
| | | UfcAfdTsdT | | faAfadTsdT | |
| 1373 | 1373-1391 | uuAfgGfgGfuGfaCfuCfcUfu | 1932 | GfUfgAfaGfgAfgUfcAfcCfcC | 1933 |
| | | CfaCfdTsdT | | fuAfadTsdT | |
| 1374 | 1374-1392 | uaGfgGfgUfgAfcUfcCfuUfc | 1934 | UfGfuGfaAfgGfaGfuCfaCfcC | 1935 |
| | | AfcAfdTsdT | | fcUfadTsdT | |
| 1404 | 1404-1422 | ucUfgGfaUfcCfaCfaGfgAfa | 1936 | CfAfgUfuCfcUfgUfgGfaUfcC | 1937 |
| | | CfuGfdTsdT | | faGfadTsdT | |
| 1408 | 1408-1426 | gaUfcCfaCfaGfgAfaCfuGfg | 1938 | UfAfuCfcAfgUfuCfcUfgUfgG | 1939 |
| | | AfuAfdTsdT | | faUfcdTsdT | |
| 1409 | 1409-1427 | auCfcAfcAfgGfaAfcUfgGfa | 1940 | AfUfaUfcCfaGfuUfcCfuGfuG | 1941 |
| | | UfaUfdTsdT | | fgAfudTsdT | |
| 1411 | 1411-1429 | ccAfcAfgGfaAfcUfgGfaUfa | 1942 | GfAfaUfaUfcCfaGfuUfcCfuG | 1943 |
| | | UfuCfdTsdT | | fuGfgdTsdT | |
| 1412 | 1412-1430 | caCfaGfgAfaCfuGfgAfuAfu | 1944 | AfGfaAfuAfuCfcAfgUfuCfcU | 1945 |
| | | UfcUfdTsdT | | fgUfgdTsdT | |
| 1419 | 1419-1437 | acUfgGfaUfaUfuCfuGfaAfa | 1946 | GfGfuUfuUfcAfgAfaUfaUfcC | 1947 |
| | | AfcCfdTsdT | | faGfudTsdT | |
| 1426 | 1426-1444 | auUfcUfgAfaAfaCfcGfuAfa | 1948 | CfCfuUfuAfcGfgUfuUfuCfaG | 1949 |
| | | AfgGfdTsdT | | faAfudTsdT | |
| 1427 | 1427-1445 | uuCfuGfaAfaAfcCfgUfaAfa | 1950 | UfCfcUfuUfaCfgGfuUfuUfcA | 1951 |
| | | GfgAfdTsdT | | fgAfadTsdT | |
| 1430 | 1430-1448 | ugAfaAfaCfcGfuAfaAfgGfa | 1952 | AfUfuUfcCfuUfuAfcGfgUfuU | 1953 |
| | | AfaUfdTsdT | | fuCfadTsdT | |
| 1431 | 1431-1449 | gaAfaAfcCfgUfaAfaGfgAfa | 1954 | GfAfuUfuCfcUfuUfaCfgGfuU | 1955 |
| | | AfuCfdTsdT | | fuUfcdTsdT | |

siRNA Sequence with Chemical Modification Info
lower case (n) = 2′-O-Me; Nf = 2′-F; dT = deoxy-T residue; s = phosphorothioate backbone modification; iB = inverted abasic

TABLE 7
AR Target Sequences

| | | | SEQ ID | | | |
|---|---|---|---|---|---|---|
| ID | Code | Target Sequence | NO: | NM_000044.3 | Exon | Species |
| XD- | 7 | CAAAGGUUCUCUGCUAGA | 1956 | 1987-2005 | 1 | h |
| 01817K1 | | CGACA | | | | |
| XD- | 27 | UCUGGGUGUCACUAUGGA | 1957 | 2819-2837 | 2 | h |
| 01827K1 | | GCUCU | | | | |
| XD- | 28 | CUGGGUGUCACUAUGGAG | 1958 | 2820-2838 | 2 | h |
| 01828K1 | | CUCUC | | | | |
| XD- | 29 | GGGUGUCACUAUGGAGCU | 1959 | 2822-2840 | 2 | h |
| 01829K1 | | CUCAC | | | | |
| XD- | 21 | UACUACAACUUUCCACUG | 1960 | 2207-2225 | 1 | h |
| 01821K1 | | GCUCU | | | | |
| XD- | 25 | AAGCUUCUGGGUGUCACU | 1961 | 2814-2832 | 2 | h, m |
| 01825K1 | | AUGGA | | | | |
| XD- | 26 | CUUCUGGGUGUCACUAUG | 1962 | 2817-2835 | 2 | h |
| 01826K1 | | GAGCU | | | | |

TABLE 8
β-catenin Target Sequences

| | Generic | | | | | |
|---|---|---|---|---|---|---|
| R # | name | Gene | Target sequences | | | |
| R- | 1797mfm | CTNNB1 | CUGUUGGAUUGAU | SEQ ID | UUUCGAAUCAAUCCA | SEQ ID |
| 1146 | | | UCGAAAUU | NO: | ACAGUU | NO. |
| | | | | 1963 | | 1964 |
| R- | 1870mfm | CTNNB1 | ACGACUAGUUCAG | SEQ ID | AAGCAACUGAACUAG | SEQ ID |
| 1147 | | | UUGCUUUU | NO. | UCGUUU | NO: |
| | | | | 1965 | | 1966 |

TABLE 9
β-catenin and β-catenin associated siRNA Sequences

| | | | Sense Strand Sequence | | | |
|---|---|---|---|---|---|---|
| | | | (5′-3′) | SEQ | Antisense Strand | SEQ |
| | Generic | | Passenger Strand | ID | Sequence (5′-3′) | ID |
| R # | name | Gene | (PS)2 | NO: | Guide Strand (GS)3 | NO: |
| R- | 1797mfm | CTNNB1 | iBcsuGfuUfgGfaUfuGf | 1967 | usUfsusCfgAfaUfcAfaUfc | 1968 |
| 1146 | | | aUfuCfgAfaAfusuiB | | CfaAfcAfgusu | |
| R- | 1870mfm | CTNNB1 | iBascGfaCfuAfgUfuCfa | 1969 | asAfsgsCfaAfcUfgAfaCfu | 1970 |
| 1147 | | | GfuUfgCfuUfusuiB | | AfgUfcGfuusu | |
| R- | PA1746 | 1746 | GCUCAAAGCAAUU | 1971 | UGUAGAAAUUGCUUU | 1972 |
| 1150 | | | UCUACAdTsdT | | GAGCdTsdT | |
| R- | PA2328 | 2328 | GGAUGAAACACAA | 1973 | UACCUUUUGUGUUUC | 1974 |
| 1151 | | | AAGGUAdTsdT | | AUCCdTsdT | |
| R- | PA2522 | 2522 | UGUCAGAGUUACU | 1975 | UGAAACAGUAACUCU | 1976 |
| 1152 | | | GUUUCAdTsdT | | GACAdTsdT | |
| R- | PA3484 | 3484 | AGCAAGAACAGAA | 1977 | UUUUAUUUCUGUUCU | 1978 |
| 1153 | | | AUAAAAdTsdT | | UGCUdTsdT | |
| R- | PA5018 | 5018 | CUAGUUCAUUUCA | 1979 | UAAUUUUGAAAUGAA | 1980 |
| 1154 | | | AAAUUAdTsdT | | CUAGdTsdT | |
| R- | PB183 | 183 | CAAGUUCACAAUU | 1981 | UUGGGUAAUUGUGAA | 1982 |
| 1155 | | | ACCCAAdTsdT | | CUUGdTsdT | |
| R- | PB272 | 272 | GCUUGAAGAUGAA | 1983 | UCGUGUUUCAUCUUC | 1984 |
| 1156 | | | ACACGAdTsdT | | AAGCdTsdT | |
| R- | PB862 | 862 | AGAUCAAGAAAAU | 1985 | UCAUACAUUUUCUUG | 1986 |
| 1157 | | | GUAUGAdTsdT | | AUCUdTsdT | |
| R- | PB948 | 948 | CCAAAGAAAACAC | 1987 | UAAUUCGUGUUUUCU | 1988 |
| 1158 | | | GAAUUAdTsdT | | UUGGdTsdT | |
| R- | PB1520 | 1520 | CUUCGAUAAGAUU | 1989 | UUCAAUAAUCUUAUC | 1990 |
| 1159 | | | AUUGAAdTsdT | | GAAGdTsdT | |
| R- | Myc953U | 953 | AGGAACUAUGACC | 1991 | AGUCGAGGUCAUAGU | 1992 |
| 1160 | | | UCGACUdTsdT | | UCCUdTsdT | |
| R- | Myc622U | 622 | ACGACGAGACCUUC | 1993 | UUGAUGAAGGUCUCG | 1994 |
| 1161 | | | AUCAAdTsdT | | UCGUdTsdT | |
| R- | Myc1370U | 1370 | AAGAUGAGGAAGA | 1995 | UCGAUUUCUUCCUCA | 1996 |
| 1162 | | | AAUCGAdTsdT | | UCUUdTsdT | |
| R- | Myc1364U | 1364 | AGGAAGAAAUCGA | 1997 | ACAACAUCGAUUUCU | 1998 |
| 1163 | | | UGUUGUdTsdT | | UCCUdTsdT | |
| R- | Mycl711U | 1711 | AGCUUUUUUGCCC | 1999 | CACGCAGGGCAAAAA | 2000 |
| 1164 | | | UGCGUGdTsdT | | AGCUdTsdT | |
| R- | Myc1769U | 1769 | AGGUAGUUAUCCU | 2001 | UUUUUAAGGAUAACU | 2002 |
| 1165 | | | UAAAAAdTsdT | | ACCUdTsdT | |

siRNA Sequence with Chemical Modification Info
lower case (n) = 2′-O-Me; Nf = 2′-F; dT = deoxy-T residue; s = phosphorothioate backbone modification; iB = inverted abasic

TABLE 10
PIK3CA* and PIK3CB* Target Sequences

| Gene | Gene | | | SEQ ID |
|---|---|---|---|---|
| Symbol | ID | Name | Target Sequences (97-mer) | NO: |
| PIK3CA | 5290 | PIK3CA_ | TGCTGTTGACAGTGAGCGCCAGCTCAAAGCAATT | 2003 |
| | | 1746 | TCTACATAGTGAAGCCACAGATGTATGTAGAAAT | |
| | | | TGCTTTGAGCTGTTGCCTACTGCCTCGGA | |
| PIK3CA | 5290 | PIK3CA_ | TGCTGTTGACAGTGAGCGAAAGGATGAAACACAA | 2004 |
| | | 2328 | AAGGTATAGTGAAGCCACAGATGTATACCTTTTGT | |
| | | | GTTTCATCCTTCTGCCTACTGCCTCGGA | |
| PIK3CA | 5290 | PIK3CA_ | TGCTGTTGACAGTGAGCGCCATGTCAGAGTTACTG | 2005 |
| | | 2522 | TTTCATAGTGAAGCCACAGATGTATGAAACAGTA | |
| | | | ACTCTGACATGATGCCTACTGCCTCGGA | |
| PIK3CA | 5290 | PIK3CA_ | TGCTGTTGACAGTGAGCGCAACTAGTTCATTTCAA | 2006 |
| | | 3555 | AATTATAGTGAAGCCACAGATGTATAATTTTGAA | |
| | | | ATGAACTAGTTTTGCCTACTGCCTCGGA | |
| PIK3CA | 5290 | PIK3CA_ | TGCTGTTGACAGTGAGCGCACAGCAAGAACAGAA | 2007 |
| | | 3484 | ATAAAATAGTGAAGCCACAGATGTATTTTATTTCT | |
| | | | GTTCTTGCTGTATGCCTACTGCCTCGGA | |
| PIK3CB | 5291 | PIK3CB_ | TGCTGTTGACAGTGAGCGACAAGATCAAGAAAAT | 2008 |
| | | 862 | GTATGATAGTGAAGCCACAGATGTATCATACATTT | |
| | | | TCTTGATCTTGCTGCCTACTGCCTCGGA | |
| PIK3CB | 5291 | PIK3CB_ | TGCTGTTGACAGTGAGCGCAGCAAGTTCACAATT | 2009 |
| | | 183 | ACCCAATAGTGAAGCCACAGATGTATTGGGTAAT | |
| | | | TGTGAACTTGCTTTGCCTACTGCCTCGGA | |
| PIK3CB | 5291 | PIK3CB_ | TGCTGTTGACAGTGAGCGCCCCTTCGATAAGATTA | 2010 |
| | | 1520 | TTGAATAGTGAAGCCACAGATGTATTCAATAATCT | |
| | | | TATCGAAGGGATGCCTACTGCCTCGGA | |
| PIK3CB | 5291 | PIK3CB_ | TGCTGTTGACAGTGAGCGAGAGCTTGAAGATGAA | 2011 |
| | | 272 | ACACGATAGTGAAGCCACAGATGTATCGTGTTTC | |
| | | | ATCTTCAAGCTCCTGCCTACTGCCTCGGA | |
| PIK3CB | 5291 | PIK3CB_ | TGCTGTTGACAGTGAGCGACACCAAAGAAAACAC | 2012 |
| | | 948 | GAATTATAGTGAAGCCACAGATGTATAATTCGTG | |
| | | | TTTTCTTTGGTGGTGCCTACTGCCTCGGA | |

*Species is Homo sapiens.

TABLE 11
PIK3CA and PIK3CB siRNA Sequences

| Gene | Gene | | | SEQ ID | | SEQ ID |
|---|---|---|---|---|---|---|
| Symbol | ID | Name | siRNA Guide | NO: | siRNA passenger | NO: |
| PIK3CA | 5290 | PIK3CA_ | UGUAGAAAUUGCUU | 2013 | AGCUCAAAGCAAUU | 2014 |
| | | 1746 | UGAGCUGU | | UCUACAUA | |
| PIK3CA | 5290 | PIK3CA_ | UACCUUUUGUGUUU | 2015 | AGGAUGAAACACAA | 2016 |
| | | 2328 | CAUCCUUC | | AAGGUAUA | |
| PIK3CA | 5290 | PIK3CA_ | UGAAACAGUAACUC | 2017 | AUGUCAGAGUUACU | 2018 |
| | | 2522 | UGACAUGA | | GUUUCAUA | |
| PIK3CA | 5290 | PIK3CA_ | UAAUUUUGAAAUGA | 2019 | ACUAGUUCAUUUCA | 2020 |
| | | 3555 | ACUAGUUU | | AAAUUAUA | |
| PIK3CA | 5290 | PIK3CA_ | UUUUAUUUCUGUUC | 2021 | CAGCAAGAACAGAA | 2022 |
| | | 3484 | UUGCUGUA | | AUAAAAUA | |
| PIK3CB | 5291 | PIK3CB_ | UCAUACAUUUUCUU | 2023 | AAGAUCAAGAAAAU | 2024 |
| | | 862 | GAUCUUGC | | GUAUGAUA | |
| PIK3CB | 5291 | PIK3CB_ | UUGGGUAAUUGUGA | 2025 | GCAAGUUCACAAUU | 2026 |
| | | 183 | ACUUGCUU | | ACCCAAUA | |
| PIK3CB | 5291 | PIK3CB_ | UUCAAUAAUCUUAU | 2027 | CCUUCGAUAAGAUU | 2028 |
| | | 1520 | CGAAGGGA | | AUUGAAUA | |
| PIK3CB | 5291 | PIK3CB_ | UCGUGUUUCAUCUU | 2029 | AGCUUGAAGAUGAA | 2030 |
| | | 272 | CAAGCUCC | | ACACGAUA | |
| PIK3CB | 5291 | PIK3CB_ | UAAUUCGUGUUUUC | 2031 | ACCAAAGAAAACAC | 2032 |
| | | 948 | UUUGGUGG | | GAAUUAUA | |

TABLE 12
Additional polynucleic acid molecule sequences

| | Base | | | | |
|---|---|---|---|---|---|
| | start | | SEQ ID | | SEQ ID |
| | position | Guide strand | NO: | Passenger strand | NO: |
| EGFR | 333 | ACUCGUGCCUUGGCAA | 2082 | AGUUUGCCAAGGCACGA | 2083 |
| R1246 | | ACUUU | | GUUU | |
| EGFR | 333 | ACUCGUGCCUUGGCAA | 2084 | AGUUUGCCAAGGCACGA | 2085 |
| R1195 | | ACUUU | | GUUU | |
| EGFR | 333 | ACUCGUGCCUUGGCAA | 2086 | AGUUUGCCAAGGCACGA | 2087 |
| R1449 | | ACUUU | | GUUU | |
| KRAS | 237 | UGAAUUAGCUGUAUC | 2088 | TGACGAUACAGCUAAUU | 2089 |
| R1450 | | GUCAUU | | CAUU | |
| KRAS | 237 | UGAAUUAGCUGUAUC | 2090 | UGACGAUACAGCUAAUU | 2091 |
| R1443 | | GUCAUU | | CAUU | |
| KRAS | 237 | UGAAUUAGCUGUAUC | 2092 | UGACGAUACAGCUAAUU | 2093 |
| R1194 | | GUCAUU | | CAUU | |
| CTNNB1 | 1248 | UAAGUAUAGGUCCUCA | 2094 | UAAUGAGGACCUAUACU | 2095 |
| R1442 | | UUAUU | | UAUU | |
| CTNNB1 | 1797 | TUUCGAAUCAAUCCAA | 2096 | CUGUUGGAUUGAUUCGA | 2097 |
| R1404 | | CAGUU | | AAUU | |
| CTNNB1 | 1797 | UUUCGAAUCAAUCCAA | 2098 | CUGUUGGAUUGAUUCGA | 2099 |
| R1441 | | CAGUU | | AAUU | |
| CTNNB1 | 1797 | UUUCGAAUCAAUCCAA | 2100 | CUGUUGGAUUGAUUCGA | 2101 |
| R1523 | | CAGUU | | AAUU | |
| HPRT | 425 | AUAAAAUCUACAGUCA | 2102 | CUAUGACUGUAGAUUUU | 2103 |
| R1492 | | UAGUU | | AUUU | |
| HPRT | 425 | UUAAAAUCUACAGUCA | 2104 | CUAUGACUGUAGAUUUU | 2105 |
| R1526 | | UAGUU | | AAUU | |
| HPRT | 425 | UUAAAAUCUACAGUCA | 2106 | CUAUGACUGUAGAUUUU | 2107 |
| R1527 | | UAGUU | | AAUU | |
| AR | 2822 | GAGAGCUCCAUAGUGA | 2108 | GUGUCACUAUGGAGCUC | 2109 |
| R1245 | | CACUU | | UCUU | |

### Example 2. General Experimental Protocol

Stem-Loop qPCR Assay for Quantification of siRNA

[0592] Plasma samples were directly diluted in TE buffer. 50 mg tissue pieces were homogenized in 1 mL of Trizol using a FastPrep-24 tissue homogenizer (MP Biomedicals) and then diluted in TE buffer. Standard curves were generated by spiking siRNA into plasma or homogenized tissue from untreated animals and then serially diluting with TE buffer. The antisense strand of the siRNA was reverse transcribed using a TaqMan MicroRNA reverse transcription kit (Applied Biosystems) with 25 nM of a sequence-specific stem-loop RT primer. The cDNA from the RT step was utilized for real-time PCR using TaqMan Fast Advanced Master Mix (Applied Biosystems) with 1.5 μM of forward primer, 0.75 μM of reverse primer, and 0.2 μM of probe. The sequences of KRAS and EGFR siRNA antisense strands and all primers and probes used to measure them are shown in Table 13. Quantitative PCR reactions were performed using standard cycling conditions in a ViiA 7 Real-Time PCR System (Life Technologies). The Ct values were transformed into plasma or tissue concentrations using the linear equations derived from the standard curves.

TABLE 13
Sequences for all siRNA antisense strands,
primers, and probes used in the stem-loop
qPCR assay.

| Target | Name | Sequence (5′-3′) | SEQ ID NO: |
|---|---|---|---|
| KRAS | Antisense | UGAAUUAGCUGUAUCGUCAUU | 2033 |
| KRAS | RT | GTCGTATCCAGTGCAGGGTCCGA | 2034 |
| | | GGTATTCGCACTGGATACGACAA | |
| | | TGACG | |
| KRAS | Forward | GGCGGCTGAATTAGCTGTATCGT | 2035 |
| KRAS | Reverse | AGTGCAGGGTCCGAG | 2036 |
| KRAS | Probe | (6FAM)-TGGATACGACAATGAC- | 2037 |
| | | (NFQ-MGB) | |
| Target | Name | Sequence (5′-3′) | |
| EGFR | Antisense | ACUCGUGCCUUGGCAAACUUU | 2038 |
| EGFR | RT | GTCGTATCCAGTGCAGGGTCCGAG | 2039 |
| | | GTATTCGCACTGGATACGACAAAG | |
| | | TTTG | |
| EGFR | Forward | GGCGGCACTCGTGCCTTGGCA | 2040 |
| EGFR | Reverse | AGTGCAGGGTCCGAG | 2041 |
| EGFR | Probe | (6FAM)-TGGATACGACAAAGTT- | 2042 |
| | | (NFQ-MGB) | |

Comparative qPCR Assay for Determination of mRNA Knockdown

[0593] Tissue samples were homogenized in Trizol as described above. Total RNA was isolated using RNeasy RNA isolation 96-well plates (Qiagen), then 500 ng RNA was reverse transcribed with a High Capacity RNA to cDNA kit (ThermoFisher). KRAS, EGFR, CTNNB1 and PPIB mRNA was quantified by TaqMan qPCR analysis performed with a ViiA 7 Real-Time PCR System. The TaqMan primers and probes for KRAS were designed and validated by Avidity and are shown in Table 14. The TaqMan primers and probes for EGFR and CTNNB1 were purchased from Applied Biosystems as pre-validated gene expression assays. PPIB (housekeeping gene) was used as an internal RNA loading control, with all TaqMan primers and probes for PPIB purchased from Applied Biosystems as pre-validated gene expression assays. Results are calculated by the comparative Ct method, where the difference between the target gene (KRAS, CTNNB1, or EGFR) Ct value and the PPIB Ct value (ΔCt) is calculated and then further normalized relative to the PBS control group by taking a second difference (ΔΔCt).

TABLE 14
Sequences of primers and probes for KRAS
mRNA detection using comparative qPCR assay.

| | | | | SEQ ID |
|---|---|---|---|---|
| Target | Species | Name | Sequence (5′-3′) | NO: |
| KRAS | Mouse | Forward | CGCCTTGACGATACAGCTAAT | 2043 |
| KRAS | Mouse | Reverse | TGTTTCCTGTAGGAGTCCTCTAT | 2044 |
| KRAS | Mouse | Probe | (6FAM)- | 2045 |
| | | | TCACTTTGT(Zen)GGATGAGTA | and |
| | | | TGACCCTACG-(IABkFQ) | 2114 |
| Target | Species | Name | Sequence (5′-3′) | |
| KRAS | Human | Forward | GTGCCTTGACGATACAGCTAAT | 2046 |
| KRAS | Human | Reverse | CCAAGAGACAGGTTTCTCCATC | 2047 |
| KRAS | Human | Probe | (6FAM)- | 2048 |
| | | | CCAACAATA(Zen)GAGGATTC | and |
| | | | CTACAGGAAGCA-(IABkFQ) | 2115 |

### Animals

[0594] All animal studies were conducted following protocols in accordance with the Institutional Animal Care and Use Committee (IACUC) at Explora BioLabs, which adhere to the regulations outlined in the USDA Animal Welfare Act as well as the “Guide for the Care and Use of Laboratory Animals” (National Research Council publication, 8th Ed., revised in 2011). All mice were obtained from either Charles River Laboratories or Harlan Laboratories.

### H358, HCC827, and Hep-3B2 1-7 Subcutaneous Flank Tumor Model

[0595] For the H358 subcutaneous flank tumor model, tumor cells were inoculated and tumors were established according to the following methods. Female NCr nu/nu mice were identified by ear-tag the day before cell injection. Mice were weighed prior to inoculation. H358 cells were cultured with 10% FBS/RPMI medium and harvested with 0.05% Trypsin and Cell Stripper (MediaTech). 5 million H358 cells in 0.05 ml Hank's Balanced Salt Solution (HBSS) with Matrigel (1:1) were injected subcutaneously (SC) into the upper right flank of each mouse. Tumor growth was monitored by tumor volume measurement using a digital caliper starting on day 7 after inoculation, and followed 2 times per week until average tumor volume reaches >100 & ≤300 mm³. Once tumors were staged to the desired volume (average from 100 to 300 mm³), animals were randomized and mice with very large or small tumors were culled. Mice were divided into the required groups and randomized by tumor volume. Mice were then treated as described in the individual experiments.

[0596] For the Hep3B orthotropic liver tumor model, tumor cells were inoculated and tumors were established according to the following methods. Female NCr nu/nu mice were identified by ear-tag the day before, mice will be anesthetized with isoflurane. The mice were then placed in a supine position on a water circulating heating pad to maintain body temperature. A small transverse incision below the sternum will be made to expose the liver. Cancer cells were slowly injected into the upper left lobe of the liver using a 28-gauge needle. The cells were injected at a 30-degree angle into the liver, so that a transparent bleb of cells can be seen through the liver capsule. Hep 3B2.1 7 cells were prepared by suspending in cold PBS (0.1-5×10⁶ cells) and mixing with diluted matrigel (30× in PBS). 30-50 ul of the cell/matrigel was inoculated. After injection, a small piece of sterile gauze was placed on the injection site, and light pressure was applied for 1 min to prevent bleeding. The abdomen was then closed with a 6-0 silk suture. After tumor cell implantation, animals were kept in a warm cage, observed for 1-2 h, and subsequently returned to the animal room after full recovery from the anesthesia. 7-10 days after tumor implantation animals were randomized, divided into the required groups and then treated as described in the individual experiments.

### LNCap Subcutaneous Flank Tumor Model

[0597] LNCaP cells (ATCC® CRL1740™) were grown in RPMI+10% FBS supplemented with non-essential amino acids and sodium pyruvate to a confluency of about 80%. Cells were mixed 1:1 with matrigel and 5-7*106 cells injected subcutaneously into male SCID mice (6-8 weeks). Tumors usually developed within 3-5 weeks to a size of 100-350 mm³. Animals bearing tumors within this range were randomized and treated with ASCs by injections into the tail vein. For PD studies animals were sacrificed 96 hours after injection and organ fragments harvested, weighted, and frozen in liquid nitrogen. For RNA isolation, organ samples were homogenized in Trizol and RNA prepared using a Qiagen RNeasy 96 Plus kit following the instructions by the manufacturer. RNA concentrations were determined spectroscopically. RNAs were converted into cDNAs by reverse transcription and expression of specific targets quantified by qPCR using the ΔΔCT method and validated Taqman assays (Thermofisher). Samples were standardize to the expression levels of PPIB.

Cholesterol siRNA Conjugate Synthesis

[0598] All siRNA single strands were fully assembled on solid phase using standard phospharamidite chemistry and purified over HPLC. Purified single strands were duplexed to get the double stranded siRNA. Structure of cholesterol conjugated to the passenger strand is illustrated in FIG. 2. Table 15 shows KRAS, EGFR, and CTNNB1 siRNA sequences.

TABLE 15

| | | | MW | SEQ |
|---|---|---|---|---|
| | | | ob- | ID |
| siRNA | Strand | Sequence (5′-3′) | served | NO: |
| KRAS | Passen- | Chol-iBusgAfcGfaUfaCfa | 7813.6 | 2049 |
| | ger | GfcUfaAfuUfcAfusuiB | | |
| KRAS | Guide | UfsGfsasAfuUfaGfcUfgUf | 6874.6 | 2050 |
| | | aUfcGfuCfausu | | |
| EGFR | Passen- | Chol-iBasgUfuUfgCfcAfa | 7884.6 | 2051 |
| | ger | GfgCfaCfgAfgUfusuiB | | |
| EGFR | Guide | asCfsusCfgUfgCfcUfuGfg | 6860.6 | 2052 |
| | | CfaAfaCfuusu | | |
| CTNNB1 | Passen- | Chol-iBcsuGfuUfgGfaUfu | 7847.5 | 2053 |
| | ger | GfaUfuCfgAfaAfusuiB | | |
| CTNNB1 | Guide | usUfsusCfgAfaUfcAfaUfc | 6852.6 | 2054 |
| | | CfaAfcAfgusu | | |

[0599] The siRNA chemical modifications include:
[0600] upper case (N)=2′-OH (ribo);
[0601] lower case (n)=2′-O-Me (methyl);
[0602] dN=2′-H (deoxy);
[0603] Nf=2′-F (fluoro);
[0604] s=phosphorothioate backbone modification;
[0605] iB=inverted abasic

### Peptide Synthesis

[0606] Peptides were synthesized on solid phase using standard Fmoc chemistry. Both peptides have cysteine at the N-terminus and the cleaved peptides were purified by HPLC and confirmed by mass spectroscopy. INF7 peptide is as illustrated in FIG. 3 (SEQ ID NO: 2055). Melittin peptide is as illustrated in FIG. 4 (SEQ ID NO: 2060).

### Anti-EGFR Antibody

[0607] Anti-EGFR antibody is a fully human IgG1κ monoclonal antibody directed against the human epidermal growth factor receptor (EGFR). It is produced in the Chinese Hamster Ovary cell line DJT33, which has been derived from the CHO cell line CHO-K1SV by transfection with a GS vector carrying the antibody genes derived from a human anti-EGFR antibody producing hybridoma cell line (2F8). Standard mammalian cell culture and purification technologies are employed in the manufacturing of anti-EGFR antibody.

[0608] The theoretical molecular weight (MW) of anti-EGFR antibody without glycans is 146.6 kDa. The experimental MW of the major glycosylated isoform of the antibody is 149 kDa as determined by mass spectrometry. Using SDS-PAGE under reducing conditions the MW of the light chain was found to be approximately 25 kDa and the MW of the heavy chain to be approximately 50 kDa. The heavy chains are connected to each other by two inter-chain disulfide bonds, and one light chain is attached to each heavy chain by a single inter-chain disulfide bond. The light chain has two intra-chain disulfide bonds and the heavy chain has four intra-chain disulfide bonds. The antibody is N-linked glycosylated at Asn305 of the heavy chain with glycans composed of N-acetyl-glucosamine, mannose, fucose and galactose. The predominant glycans present are fucosylated bi-antennary structures containing zero or one terminal galactose residue.

[0609] The charged isoform pattern of the IgG1κ antibody has been investigated using imaged capillary IEF, agarose IEF and analytical cation exchange HPLC. Multiple charged isoforms are found, with the main isoform having an isoelectric point of approximately 8.7.

[0610] The major mechanism of action of anti-EGFR antibody is a concentration dependent inhibition of EGF-induced EGFR phosphorylation in A431 cancer cells. Additionally, induction of antibody-dependent cell-mediated cytotoxicity (ADCC) at low antibody concentrations has been observed in pre-clinical cellular in vitro studies.

### Example 3: Synthesis, Purification and Analysis of Antibody-PEG-EGFR and Antibody-EGFR Conjugates

[chemical structure]

Step 1: Antibody Conjugation with Maleimide-PEG-NHS Followed by SH-EGFR

[0611] Anti-EGFR antibody (EGFR-Ab) was exchanged with 1× Phosphate buffer (pH 7.4) and made up to 5 mg/ml concentration. To this solution, 2 equivalents of SMCC linker or maleimide-PEGxkDa-NHS (x=1, 5, 10, 20) was added and rotated for 4 hours at room temperature. Unreacted maleimide-PEG was removed by spin filtration using 50 kDa MWCO Amicon spin filters and PBS pH 7.4. The antibody-PEG-Mal conjugate was collected and transferred into a reaction vessel. SH-C6-EGFR (2 equivalents) was added at RT to the antibody-PEG-maleimide in PBS and rotated overnight. The reaction mixture was analyzed by analytical SAX column chromatography and conjugate along with unreacted antibody and siRNA was seen.

### Step 2: Purification

[0612] The crude reaction mixture was purified by AKTA explorer FPLC using anion exchange chromatography method-1. Fractions containing the antibody-PEG-EGFR conjugate were pooled, concentrated and buffer exchanged with PBS, pH 7.4. Antibody siRNA conjugates with SMCC linker, PEG1 kDa, PEG5 kDa and PEG10 kDa were separated based on the siRNA loading. Conjugates with PEG20 kDa gave poor separation.

### Step-3: Analysis of the Purified Conjugate

[0613] The isolated conjugate was characterized by either mass spec or SDS-PAGE. The purity of the conjugate was assessed by analytical HPLC using either anion exchange chromatography method-2 or anion exchange chromatography method-3. Examples of all the conjugates made using these methods are described in Table 16.

TABLE 16
List of AXCYB conjugates

| | HPLC retention time (minutes) with Anion | | |
|---|---|---|---|
| | exchange chromatography method-2 | | |
| Conjugate | DAR = 1 | DAR = 2 | DAR = >2 |
| EGFR-Ab-EGFR | 9.0 | 9.9 | 10.4 |
| EGFR-Ab-PEG1kDa-EGFR | 9.2 | 10.0 | 10.6 |
| EGFR-Ab-PEG5kDa-EGFR | 8.7 | 9.3 | ND |
| EGFR-Ab-PEG10kDa-EGFR | 8.6 | 8.8 to 10; mix of DAR 2-3 | |
| EGFR-Ab-PEG20kDa-EGFR | 8.6; Mixture of DAR of 1-3 | | |
| Holo-anti-B cell | 9.2 | | 9.5 |
| Ab-PEG20kDa-EGFR | | | |

### Anion Exchange Chromatography Method-1

[0614] 1. Column: Tosoh Bioscience, TSKGel SuperQ-5PW, 21.5 mm ID×15 cm, 13 um
[0615] 2. Solvent A: 20 mM TRIS buffer, pH 8.0; Solvent B: 20 mM TRIS, 1.5 M NaCl, pH 8.0; Flow Rate: 6.0 ml/min
[0616] 3. Gradient:

| | | | Column |
|---|---|---|---|
| a. | % A | % B | Volume |
| b. | 100 | 0 | 1.00 |
| c. | 60 | 40 | 18.00 |
| d. | 40 | 60 | 2.00 |
| e. | 40 | 60 | 5.00 |
| f. | 0 | 100 | 2.00 |
| g. | 100 | 0 | 2.00 |

### Anion Exchange Chromatography Method-2

[0617] 1. Column: Thermo Scientific, ProPac™ SAX-10, Bio LC™, 4×250 mm
[0618] 2. Solvent A: 80% 10 mM TRIS pH 8, 20% ethanol; Solvent B: 80% 10 mM TRIS pH 8, 20% ethanol, 1.5 M NaCl; Flow Rate: 1.0 ml/min
[0619] 3. Gradient:

| a. | Time | % A | % B |
|---|---|---|---|
| b. | 0.0 | 90 | 10 |
| c. | 3.00 | 90 | 10 |
| d. | 11.00 | 40 | 60 |
| e. | 13.00 | 40 | 60 |
| f. | 15.00 | 90 | 10 |
| g. | 20.00 | 90 | 10 |

### Anion Exchange Chromatography Method-3

[0620] 1. Column: Thermo Scientific, ProPac™ SAX-10, Bio LC™, 4×250 mm
[0621] 2. Solvent A: 80% 10 mM TRIS pH 8, 20% ethanol; Solvent B: 80% 10 mM TRIS pH 8, 20% ethanol, 1.5 M NaCl
[0622] 3. Flow Rate: 0.75 ml/min
[0623] 4. Gradient:

| a. | Time | % A | % B |
|---|---|---|---|
| b. | 0.0 | 90 | 10 |
| c. | 3.00 | 90 | 10 |
| d. | 11.00 | 40 | 60 |
| e. | 23.00 | 40 | 60 |
| f. | 25.00 | 90 | 10 |
| g. | 30.00 | 90 | 10 |

[0624] The analytical data for EGFR antibody-PEG20 kDa-EGFR are illustrated in FIG. 5 and FIG. 6. FIG. 5 shows the analytical HPLC of EGFR antibody-PEG20 kDa-EGFR. FIG. 6 shows a SDS-PAGE analysis of EGFR antibody-PEG20 kDa-EGFR conjugate. The analytical chromatogram of EGFR antibody-PEG10 kDa-EGFR is illustrated in FIG. 7. The analytical data for EGFR antibody-PEG5 kDa-EGFR are illustrated in FIG. 8 and FIG. 9. FIG. 8 shows the analytical chromatogram of EGFR antibody-PEG5 kDa-EGFR. FIG. 9 shows SDS PAGE analysis of EGFR antibody-PEG10 kDa-EGFR and EGFR antibody-PEG5 kDa-EGFR conjugates. The analytical data for EGFR antibody-PEG1 kDa-EGFR conjugates with different siRNA loading is illustrated in FIG. 10.

### Example 4: Synthesis, Purification and Analysis of Antibody-siRNA-PEG Conjugates

[chemical structure]

### Conjugation Scheme-2

Step 1: Antibody Conjugation with SMCC Linker Followed by SH-KRAS-PEG5 kDa

[0625] Anti-EGFR antibody was exchanged with 1× Phosphate buffer (pH 7.4) and made up to 5 mg/ml concentration. To this solution, 2 equivalents of SMCC linker (succinimidyl 4-(N-maleimidomethyl)cyclohexane-1-carboxylate) was added and rotated for 4 hours at room temperature. Unreacted SMCC linker was removed by spin filtration using 50 kDa MWCO Amicon spin filters and PBS buffer pH 7.4. The retentate was collected and 2 equivalents of SH-C6-KRAS-PEG5 kDa was added at RT and rotated overnight. The reaction mixture was analyzed by analytical SAX column chromatography and the conjugate along with unreacted antibody and siRNA was observed.

### Step 2: Purification

[0626] The crude reaction mixture was purified by AKTA explorer FPLC using anion exchange chromatography method-1. Fractions containing the antibody-KRAS-PEG conjugate were pooled, concentrated and buffer exchanged with PBS, pH 7.4.

### Step-3: Analysis of the Purified Conjugate

[0627] The isolated conjugate was characterized by either mass spec or SDS-PAGE. The purity of the conjugate was assessed by analytical HPLC using anion exchange chromatography method-3 (described in example 1). Examples of the conjugates made using the methods described in Examples 4 and 5 are illustrated in Table 17.

TABLE 17
List of A-X-B-Y-C conjugates

| | HPLC retention time (minutes) with Anion | | |
|---|---|---|---|
| | exchange chromatography method-3 | | |
| Conjugate | DAR = 1 | DAR = 2 | DAR = >2 |
| EGFR-Ab-KRAS-PEG5kDa | 9.2 | | |
| EGFR-Ab-S-S-KRAS- | 9.0 | | |
| PEG5kDa | | | |
| Holo-anti-B cell Ab- | 9.2 | 9.7 | 10.1 |
| KRAS-PEGkDa | | | |
| Panitumumab-KRAS- | 9.2 | 9.7 | 10.2 |
| PEG5kDa | | | |

[0628] The HPLC chromatogram of EGFR Antibody-KRAS-PEG5 kDa is illustrated in FIG. 11. The HPLC chromatogram of Panitumumab-KRAS-PEG5 kDa is as shown in FIG. 12.

### Example 5: Synthesis, Purification and Analysis of Antibody-S—S-siRNA-PEG Conjugates

[chemical structure]

Step 1: Antibody Conjugation with SPDP Linker Followed by SH-siRNA-PEG5 kDa

[0629] Anti-EGFR antibody was exchanged with 1× Phosphate buffer (pH 7.4) and made up to 5 mg/ml concentration. To this solution, 2 equivalents of SPDP linker (succinimidyl 3-(2-pyridyldithio)propionate) was added and rotated for 4 hours at room temperature. Unreacted SPDP linker was removed by spin filtration using 50 kDa MWCO Amicon spin filters and pH 7.4 PBS buffer. The retentate was collected and 2 equivalents of SH-C6-siRNA-PEG5 kDa was added at room temperature and rotated overnight. The reaction mixture was analyzed by analytical SAX column chromatography and conjugate along with unreacted antibody and siRNA was seen.

### Step 2: Purification

[0630] The crude reaction mixture was purified by AKTA explorer FPLC using anion exchange chromatography method-1. Fractions containing the antibody-PEG-siRNA conjugate were pooled, concentrated and buffer exchanged with PBS, pH 7.4.

### Step-3: Analysis of the Purified Conjugate

[0631] The isolated conjugate was characterized by either mass spec or SDS-PAGE. The purity of the conjugate was assessed by analytical HPLC using anion exchange chromatography method-2. The HPLC chromatogram of EGFR Antibody-S—S-siRNA-PEG5 kDa (DAR=1) is as shown in FIG. 13.

### Example 6: Synthesis, Purification and Analysis of Antibody-SMCC-Endosomal Escape Peptide Conjugates

[chemical structure]

Step 1: Antibody Conjugation with SMCC Linker or Maleimide-PEG-NHS Followed by SH-Cys-Peptide-CONH₂

[0632] Anti-EGFR antibody was exchanged with 1× Phosphate buffer (pH 7.4) and made up to 10 mg/ml concentration. To this solution, 3 equivalents of SMCC linker (succinimidyl 4-(N-maleimidomethyl)cyclohexane-1-carboxylate) or maleimide-PEG1 kDa-NHS was added and rotated for 1.5 hours at room temperature. Unreacted SMCC linker or PEG linker was removed by spin filtration using 50 kDa MWCO Amicon spin filters and PBS buffer pH 7.4 (25 mM MES pH=6.1 for Melittin conjugates). The retentate was collected and 3 equivalents of SH-Cys-Peptide-CONH₂ was added at RT and rotated overnight. The reaction mixture was then purified by either HIC chromatography or cation exchange chromatography to isolate the anti-EGFR antibody-Peptide or anti-EGFR antibody-PEG1k-Peptide.

### Step 2: Purification

[0633] The crude reaction mixture was purified by AKTA explorer FPLC using either hydrophobic interaction chromatography (HIC) method-1 or cation exchange chromatography method-1. Fractions containing the antibody-peptide conjugates were pooled, concentrated and buffer exchanged with PBS, pH 7.4 (10 mM Acetate pH=6.0 for Melittin conjugates).

### Step-3: Analysis of the Purified Conjugate

[0634] The isolated conjugate was characterized by either mass spec or SDS-PAGE. Purity and peptide loading was assessed by analytical HPLC using either HIC method-2 or cation exchange chromatography method-2. Examples of all the conjugates made using the method of Example 6 are described in Tables 18 and 19.

TABLE 18
List of AXYD conjugates

| | HPLC retention time (minutes) with | | |
|---|---|---|---|
| | HIC method-2 | | |
| Conjugate | DAR = 1 | DAR = 2 | DAR = >2 |
| EGFR-Ab-INF7 | 7.7 | 9.3 | 11.2 |
| EGFR-Ab-PEG24-INF7 | 8.4 | 12.2 | 15.2 |

TABLE 19
List of AXYD conjugates

| | HPLC retention time (minutes) with cation | | |
|---|---|---|---|
| | exchange chromatography method-2 | | |
| Conjugate | DAR = 1 | DAR = >1 | DAR = >2 |
| EGFR-Ab-Melittin | 40.9 | 54.8 | |
| EGFR-Ab-PEG1kDa- | 48. | 53.4 | 55.8 |
| melittin | | | |

### Cation Exchange Chromatography Method-1

[0635] 1. Column: GE Healthcare HiPrep SP HP 16/10
[0636] 2. Solvent A: 50 mM MES pH=6.0; Solvent B: 50 mM MES+0.5M NaCl pH=6.0; Flow Rate: 2.0 ml/min
[0637] 3. Gradient:

| a. | % A | % B | Column Volume |
|---|---|---|---|
| b. | 100 | 0 | 0.1 |
| c. | 100 | 0 | Flush loop 12 ml |
| d. | 100 | 0 | 2.5 |
| e. | 0 | 100 | 15 |
| f. | 0 | 100 | 5 |
| g. | 100 | 0 | 0.5 |
| h. | 100 | 0 | 5 |

### Cation Exchange Chromatography Method-2

[0638] 1. Column: Thermo Scientific, MAbPac™ SCX-10, Bio LC™, 4×250 mm (product #074625)
[0639] 2. Solvent A: 20 mM MES pH=5.5; Solvent B: 20 mM MES+0.3 M NaCl pH=5.5; Flow Rate: 0.5 ml/min
[0640] 3. Gradient:

| a. | Time | % A | % B |
|---|---|---|---|
| b. | 0.0 | 100 | 0 |
| c. | 5 | 100 | 0 |
| d. | 50 | 0 | 100 |
| e. | 80 | 0 | 100 |
| f. | 85 | 100 | 0 |
| g. | 90 | 100 | 0 |

### Hydrophobic Interaction Chromatography Method-1 (HIC Method-1)

[0641] 1. Column: GE Healthcare Butyl Sepharose High Performance (17-5432-02) 200 ml
[0642] 2. Solvent A: 50 mM Sodium Phosphate+0.8M ammonium sulfate (pH=7.0); Solvent B: 80% 50 mM Sodium Phosphate (pH=7.0), 20% IPA; Flow Rate: 3.0 ml/min
[0643] 3. Gradient:

| a. | % A | % B | Column Volume |
|---|---|---|---|
| b. | 100 | 0 | 0.1 |
| c. | 0 | 100 | 3 |
| d. | 0 | 100 | 1.35 |
| e. | 100 | 0 | 0.1 |
| f. | 100 | 0 | 0.5 |

### Hydrophobic Interaction Chromatography Method-2 (HIC Method-2)

[0644] 1. Column: Tosoh Bioscience TSKgel Butyl-NPR 4.6 mm ID×10 cm 2.5 μm
[0645] 2. Solvent A: 100 mM Sodium phosphate+1.8 M ammonium sulfate (pH=7.0); Solvent B: 80% 100 mM sodium phosphate (pH=7.0), 20% IPA; Flow Rate: 0.5 ml/min
[0646] 3. Gradient:

| a. | Time | % A | % B |
|---|---|---|---|
| b. | 0 | 100 | 0 |
| c. | 3 | 50 | 50 |
| d. | 21 | 0 | 100 |
| e. | 23 | 0 | 100 |
| f. | 25 | 100 | 0 |

[0647] FIG. 14 illustrates the HPLC chromatogram of EGFR antibody-PEG24-Melittin (loading=˜1). FIG. 15 illustrates the HPLC chromatogram of EGFR antibody-Melittin (n=˜1). FIG. 16 shows the mass spectrum of EGFR antibody-Melittin (n=1). FIG. 17 shows the HIC chromatogram of EGFR antibody-PEG1 kDa-INF7 (Peptide loading=˜1). FIG. 18 shows the HPLC chromatogram of EGFR antibody-INF7 (Peptide Loading=˜1).

### Example 7: Synthesis, Purification and Analysis of EEP-Antibody-siRNA-PEG Conjugates

[chemical structure]

### Step 1: Conjugation of PEG24 Linker Followed by SH-CVs-Peptide-CONH₂ to EGFR-Ab-siRNA-PEG

[0648] EGFR-Ab-siRNA-PEG conjugate with a siRNA loading of 1 was conjugated with 4 equivalents of PEG1k linker (succinimidyl 4-(N-maleimidomethyl)cyclohexane-1-carboxylate) in PBS, pH 7.4 buffer and rotated for 1.5 hours at room temperature. Unreacted PEG1k linker was removed by spin filtration using 50 kDa MWCO Amicon spin filters and PBS buffer pH 7.4. The retentate was collected and 4 equivalents of SH-Cys-Peptide-CONH₂ was added at RT and rotated overnight.

### Step 2: Purification

[0649] The reaction mixture was then purified by repeated spin filtration using PBS buffer pH7.4 and 50 kDa Amicon spin filters until the unreacted peptide was removed as monitored by HPLC. The product contains a mixture of conjugates with 0, 1, 2, 3 or more peptides conjugated to the antibody backbone.

### Step-3: Analysis of the Purified Conjugate

[0650] The isolated conjugate was characterized by either mass spec or SDS-PAGE. The purity and the peptide loading of the conjugate was assessed by analytical HPLC using either HIC method-2 or cation exchange chromatography method-2. Examples of the conjugates made using the method described in Example 7 are shown in Table 20.

TABLE 20
List of (A-X-B-Y-Cn)-L-D conjugates

| | HPLC retention time (minutes) with cation | | | |
|---|---|---|---|---|
| | exchange chromatography method-2 | | | |
| Conjugate | DAR = 0 | DAR = 1 | DAR = 2 | DAR = 3 |
| (EGFR-Ab-siRNA- | 24 | 38 | 27 | 9 |
| PEG5kDa)-PEG1k-INF7 | | | | |

| | | |
|---|---|---|
| (EGFR-Ab-siRNA- | 24 | 11.79 (broad peak) |
| PEG5kDa)-PEG1k- | | |
| melittin | | |

[0651] FIG. 19 shows INF7-PEG1 kDa-(EGFR antibody-KRAS-PEG5 kDa). FIG. 20 shows Melittin-PEG1 kDa-(EGFR antibody-KRAS-PEG5 kDa).

### Example 8: In Vivo Pharmacokinetics Study of a EGFR Antibody-siRNA-PEG Conjugate (PK-055)

[0652] Groups (n=3) of female NCr nu/nu mice bearing subcutaneous flank H358 tumors 100-150 mm³ in volume were treated with one intravenous (i.v.) tail vein injection of siRNA conjugate, while control groups (n=4) of the same mice received one i.v. injection of PBS as a vehicle control. Treatment groups that received EGFR antibody-siRNA-PEG conjugates were dosed at 0.5 mg/kg (based on the weight of siRNA) and groups that received cholesterol-siRNA conjugates were dosed at 15 mg/kg. All groups (treatments and controls) were administered a dose volume of 5 mL/kg. Non-terminal blood samples were collected at 2, 15, or 60 minutes post-dose via puncture of the retro-orbital plexus and centrifuged to generate plasma for PK analysis. Mice were sacrificed by CO₂ asphyxiation at 24, 96, or 168 h post-dose. Table 21 describes the study design in more detail and provides a cross-reference to the conjugate synthesis and characterization. Terminal blood samples were collected via cardiac puncture and processed to generate plasma for PK analysis. 50 mg pieces of tumor, liver, kidney, and lung were collected and snap-frozen in liquid nitrogen. mRNA knockdown analysis and siRNA quantitation were performed as described in Examples 2-7.

TABLE 21
Study design for a EGFR antibody-siRNA-PEG Conjugate (PK-055) with a
cross-reference to the synthesis and characterization of the conjugates tested.

| | | | | siRNA: | melittin: | | | | | | |
|---|---|---|---|---|---|---|---|---|---|---|---|
| | | | siRNA | EGFR-Ab | siRNA | | | Survival | Terminal | Harvest | Cross-reference |
| | Test | | Dose | Ratio | Ratio | | Dose | Bleed | Bleed | Time | to synthesis and |
| Group | Article | N | (mg/kg) | (mol/mol) | (mol/mol) | ROA | Schedule | (min) | (h) | (h) | characterization |
| 4 | EGFR- | 3 | 0.5 | 1.4 | — | IV | t = 0 | 2 | 24 | 24 | Example 3 |
| 5 | Ab- | 3 | 0.5 | 1.4 | — | IV | t = 0 | 15 | 96 | 96 | |
| 6 | PEG10k- | 3 | 0.5 | 1.4 | — | IV | t = 0 | 60 | 168 | 168 | |
| | EGFR | | | | | | | | | | |
| 7 | EGFR- | 3 | 0.5 | 1.25 | — | IV | t = 0 | 2 | 24 | 24 | Example 3 |
| 8 | Ab- | 3 | 0.5 | 1.25 | — | IV | t = 0 | 15 | 96 | 96 | |
| 9 | PEG5k- | 3 | 0.5 | 1.25 | — | IV | t = 0 | 60 | 168 | 168 | |
| | EGFR | | | | | | | | | | |
| 10 | EGFR- | 3 | 0.5 | 1.25 | — | IV | t = 0 | 2 | 24 | 24 | Example 3 |
| 11 | Ab- | 3 | 0.5 | 1.25 | — | IV | t = 0 | 15 | 96 | 96 | |
| 12 | PEG1k- | 3 | 0.5 | 1.25 | — | IV | t = 0 | 60 | 168 | 168 | |
| | EGFR | | | | | | | | | | |
| 13 | EGFR- | 3 | 0.5 | 1.3 | — | IV | t = 0 | 2 | 24 | 24 | Example 3 |
| 14 | Ab- | 3 | 0.5 | 1.3 | — | IV | t = 0 | 15 | 96 | 96 | |
| 15 | EGFR | 3 | 0.5 | 1.3 | — | IV | t = 0 | 60 | 168 | 168 | |
| 16 | EGFR- | 3 | 0.5 | 2.6 | — | IV | t = 0 | 2 | 24 | 24 | Example 4 |
| 17 | Ab- | 3 | 0.5 | 2.6 | — | IV | t = 0 | 15 | 96 | 96 | |
| 18 | KRAS- | 3 | 0.5 | 2.6 | — | IV | t = 0 | 60 | 168 | 168 | |
| | PEG5k | | | | | | | | | | |
| | (n = 2 | | | | | | | | | | |
| | siRNAs | | | | | | | | | | |
| | per | | | | | | | | | | |
| | EGFR- | | | | | | | | | | |
| | Ab) | | | | | | | | | | |
| 19 | EGFR- | 3 | 0.5 | 1.0 | — | IV | t = 0 | 2 | 24 | 24 | Example 4 |
| 20 | Ab- | 3 | 0.5 | 1.0 | — | IV | t = 0 | 15 | 96 | 96 | |
| 21 | KRAS- | 3 | 0.5 | 1.0 | — | IV | t = 0 | 60 | 168 | 168 | |
| | PEG5k | | | | | | | | | | |
| | (n = 1 | | | | | | | | | | |
| | siRNA | | | | | | | | | | |
| | per | | | | | | | | | | |
| | EGFR- | | | | | | | | | | |
| | Ab) | | | | | | | | | | |
| 22 | EGFR- | 3 | 0.5 | 1.0 | 1:1 | IV | t = 0 | 2 | 24 | 24 | Example |
| 23 | Ab- | 3 | 0.5 | 1.0 | 1:1 | IV | t = 0 | 15 | 96 | 96 | 4 and 6 |
| 24 | KRAS- | 3 | 0.5 | 1.0 | 1:1 | IV | t = 0 | 60 | 168 | 168 | |
| | PEG5k | | | | | | | | | | |
| | (n = 1) + | | | | | | | | | | |
| | EGFR- | | | | | | | | | | |
| | Ab- | | | | | | | | | | |
| | melittin | | | | | | | | | | |
| 25 | Chol- | 3 | 15 | — | — | IV | t = 0 | 2 | 24 | 24 | General |
| 26 | EGFR- | 3 | 15 | — | — | IV | t = 0 | 15 | 96 | 96 | experimental |
| 27 | 333mfm | 3 | 15 | — | — | IV | t = 0 | 60 | 168 | 168 | (Example 2) |
| 28 | Chol- | 3 | 15 | — | — | IV | t = 0 | 2 | 24 | 24 | General |
| 29 | KRAS- | 3 | 15 | — | — | IV | t = 0 | 15 | 96 | 96 | experimental |
| 30 | 237ffm | 3 | 15 | — | — | IV | t = 0 | 60 | 168 | 168 | (Example 2) |
| 31 | Vehicle | 4 | — | — | — | IV | t = 0 | — | — | 24 | |
| 32 | | 4 | — | — | — | IV | t = 0 | — | — | 96 | |
| 33 | | 4 | — | — | — | IV | t = 0 | — | — | 168 | |

[0653] PEG linkers of various molecular weights and a small molecule linker were used to attach EGFR siRNA to an EGFR antibody (EGFR-Ab) and the PK was assessed to determine the effect of the linker molecular weight on the behavior of the mAb-siRNA conjugate in plasma. As illustrated in FIG. 21, the molecular weight of the PEG linker does not have a large impact on the plasma PK, except for the 10 kDa PEG leads to a faster siRNA clearance (i.e. lower plasma concentrations at later times). The orientation of the siRNA and PEG relative to the EGFR-Ab was also explored. As illustrated in FIG. 22, having the siRNA in between the EGFR-Ab and the PEG5k (EGFR antibody-KRAS-PEG5k) results in significantly higher plasma concentrations than the alternative conjugate where PEG5k is in between the EGFR-Ab and the siRNA (EGFR antibody-PEG5k-EGFR). In some instances, the use of two different siRNAs on these conjugates does not impact the plasma kinetics.

[0654] The drug loading on the EGFR-Ab was also investigated, with n=1 and n=2 siRNAs per EGFR-Ab. As illustrated in FIG. 23, having only one siRNA per EGFR-Ab resulted in much higher plasma concentrations, whereas the higher loading of n=2 siRNA per EGFR-Ab resulted in faster clearance from plasma. The impact of adding an endosomal escape peptide (melittin) was assessed. EGFR antibody-KRAS-PEG5k and EGFR antibody-melittin were mixed together in solution and co-injected. As illustrated in FIG. 24, the presence of EGFR antibody-melittin increases the clearance from plasma of EGFR antibody-KRAS-PEG5k at later times.

[0655] The plasma PK of cholesterol-siRNA conjugates was next compared to the mAb-siRNA conjugates after intravenous administration via tail vein injection. As illustrated in FIG. 25, the chol-siRNA conjugates are cleared much faster from plasma than the mAb-siRNA conjugates. As illustrated from the PK profile, having either EGFR or KRAS siRNA on the conjugate did not affect the plasma kinetics.

[0656] In addition to the plasma PK analysis, siRNA concentrations were determined in tissues at various times post-dose to determine the tissue PK. Tissue concentrations were measured pmol/g and then converted to pmol/mL by assuming the density of tissue equals 1 g/mL. In FIG. 26, a concentration of 1 nM=1 nmol/L=1 pmol/mL=1 pmol/g tissue. As illustrated in FIG. 26A, a single i.v. dose of 0.5 mg/kg of EGFR antibody-siRNA resulted in approximately 100 nM concentrations of siRNA in tumor at 24 h post-dose for virtually all of the conjugates. In the case of these EGFR antibody-linker-siRNA conjugates, the molecular weight of the linker between the EGFR-Ab and the EGFR siRNA does not seem to alter the PK of these conjugates in the s.c. flank H358 tumors. As illustrated in FIG. 26B, the concentration of siRNA in liver following a single i.v. dose of 0.5 mg/kg of EGFR antibody-siRNA is approximately 100 nM at 24 h post-dose, similar to that seen in tumor. Only the small molecule linker at 24 h post-dose produces a siRNA concentration in liver approximately half of what is seen with longer PEG linkers. siRNA concentrations decrease over time in both tumor and liver tissue with these EGFR antibody-linker-siRNA conjugates.

[0657] The orientation of the siRNA and PEG relative to the EGFR-Ab was also explored relative to the tissue PK profiles. As illustrated in FIG. 27, both the EGFR antibody-KRAS-PEG5k and the EGFR antibody-PEG5k-EGFR conjugates deliver approximately 100 nM siRNA into both tumor and liver following a single i.v. dose of 0.5 mg/kg. However, while the EGFR antibody-KRAS-PEG5k maintains the siRNA concentration in tumor at approximately 100 nM until 168 h post-dose, the other 3 curves decline in concentration over time. Next, the tissue PK as a function of drug loading was assessed. As illustrated from FIG. 28, n=1 siRNA per EGFR-Ab delivered higher amounts of siRNA into tumor compared to liver. However, increasing the siRNA loading to n=2 siRNA per EGFR-Ab increased the amount of siRNA delivered to liver and decreased the amount of siRNA delivered to tumor. Additionally, EGFR antibody-melittin was mixed with some formulations in order to introduce endosomal escape functionality. As illustrated from FIG. 29, mixing and co-administering EGFR antibody-melittin with EGFR antibody-siRNA did not have a large impact on the tissue PK. The addition of melittin decreased uptake of siRNA in tumor and increased the uptake of siRNA in liver.

[0658] The tissue PK profiles of cholesterol-siRNA conjugates (using both EGFR and KRAS siRNA) in liver and in s.c. flank H358 tumors was also assessed. As illustrated from FIG. 30, both chol-siRNA conjugates delivered approximately 5 μM concentrations of siRNA into liver 24 h following a single i.v. dose of 15 mg/kg. In liver, the chol-KRAS appears to clear slightly faster than the chol-EGFR on the 1-week time scale. The two different chol-siRNA conjugates further show different PK profiles in tumor. Both cholesterol conjugates deliver less siRNA into tumor compared to liver, but the chol-EGFR delivers more siRNA into tumor when compared to the chol-KRAS conjugate. Both chol-siRNA conjugates are cleared from tumor over time and with a similar slope.

[0659] A PD analysis followed the PK analysis. As illustrated in FIG. 31A, the chol-KRAS conjugate produced only marginal (˜25%) mRNA knockdown of the KRAS target gene in tumor following a single i.v. dose of 15 mg/kg. However, as illustrated in FIG. 31B, the same 15 mg/kg dose of chol-KRAS was able to produce >50% mRNA knockdown in the mouse liver. The chol-EGFR conjugate was able to produce >50% mRNA knockdown in tumor, as illustrated in FIG. 32. In some instances, the higher knockdown with chol-EGFR in tumor compared to chol-KRAS is due to the higher siRNA concentrations observed in tumor with chol-EGFR compared to chol-KRAS (FIG. 30). Finally, as illustrated in FIGS. 33 and 34, most of the EGFR antibody-siRNA conjugates resulted in approximately 25-50% EGFR or KRAS mRNA knockdown in tumors after a single IV dose, but at a much lower dose (0.5 mg/kg) compared to the chol-siRNA conjugates.

### Example 9: Synthesis, Purification and Analysis of Additional Antibody-siRNA Conjugates

[chemical structure]

Step 1: Antibody Conjugation with SMCC Linker Followed by SH-siRNA

[0660] Antibody was buffer exchanged with 1× Phosphate buffer (pH 7.4) and made up to 10 mg/ml concentration. To this solution, 2 equivalents of SMCC linker dissolved in DMSO was added and rotated for 4 hours at room temperature. Unreacted SMCC linker was removed by spin filtration using 50 kDa MWCO Amicon spin filters and PBS pH 7.4. The antibody-maleimide conjugate was collected into a reaction vessel and SH-C6-siRNA or SH-C6-siRNA-C6-NHCO-PEG-XkDa (2 equivalents) (X=0.5 kDa to 10 kDa) was added at RT in pH 7.4 PBS with 5 mM EDTA and rotated overnight. Analysis of the reaction mixture by analytical SAX column chromatography method-2 showed antibody siRNA conjugate along with unreacted antibody and siRNA.

### Step 2: Purification

[0661] The crude reaction mixture was purified by AKTA explorer FPLC using anion exchange chromatography method-1. Fractions containing DAR1 and DAR>2 antibody-siRNA-PEG conjugates were separated, concentrated and buffer exchanged with pH 7.4 PBS.

### Step-3: Analysis of the Purified Conjugate

[0662] The isolated conjugates were characterized by SAX chromatography, SEC chromatography and SDS-PAGE analysis. The purity of the conjugate was assessed by analytical HPLC using either anion exchange chromatography method-2. All DAR1 conjugate generally eluted at 9.0±0.4 minutes while the DAR2 and DAR3 conjugates generally eluted at 9.7±0.2 minutes. Typical DAR1 conjugate is greater than 90% pure after purification while typical DAR>2 lysine conjugates contains 70-80% DAR2 and 20-30% DAR3.

[chemical structure]

Step 1: Antibody Interchain Disulfide Reduction with TCEP

[0663] Antibody was buffer exchanged with borax buffer (pH 8) and made up to 10 mg/ml concentration. To this solution, 2 equivalents of TCEP in water was added and rotated for 2 hours at RT. The resultant reaction mixture was buffer exchanged with pH 7.4 PBS containing 5 mM EDTA and added to a solution of SMCC-C6-siRNA or SMCC-C6-siRNA-C6-NHCO-PEG-XkDa (2 equivalents) (X=0.5 kDa to 10 kDa) in pH 7.4 PBS containing 5 mM EDTA at RT and rotated overnight. Analysis of the reaction mixture by analytical SAX column chromatography showed antibody siRNA conjugate along with unreacted antibody and siRNA.

### Step 2: Purification

[0664] The crude reaction mixture was purified by AKTA explorer FPLC using anion exchange chromatography method-1. Fractions containing DAR1 and DAR>2 antibody-PEG-siRNA conjugates were separated, concentrated and buffer exchanged with pH 7.4 PBS.

### Step-3: Analysis of the Purified Conjugate

[0665] The isolated conjugates were characterized by SEC, SAX chromatography and SDS-PAGE. The purity of the conjugate was assessed by analytical HPLC using either anion exchange chromatography method-2 or anion exchange chromatography method-3. Isolated DAR1 conjugates are typically eluted at 9.0+0.3 min on analytical SAX method-2 and are greater than 90% pure. The typical DAR>2 cysteine conjugate contains more than 85% DAR2 and less than 15% DAR3.

[chemical structure]

Step 1: Antibody Interchain Disulfide Reduction with TCEP

[0666] Antibody was buffer exchanged with borax buffer (pH 8) and made up to 10 mg/ml concentration. To this solution, 2 equivalents of TCEP in water was added and rotated for 2 hours at RT. The resultant reaction mixture was buffer exchanged with pH 7.4 PBS containing 5 mM EDTA and added to a solution of CBTF-C6-siRNA-C6-NHCO-PEG-5 kDa (2 equivalents) in pH 7.4 PBS containing 5 mM EDTA at RT and rotated overnight. Analysis of the reaction mixture by analytical SAX column chromatography showed antibody siRNA conjugate along with unreacted antibody and siRNA.

### Step 2: Purification

[0667] The crude reaction mixture was purified by AKTA explorer FPLC using anion exchange chromatography method-1. Fractions containing DAR1 and DAR≥2 antibody-siRNA conjugates were separated, concentrated and buffer exchanged with pH 7.4 PBS. Typical DAR>2 cysteine conjugate contains greater than 85% DAR2 and less than 15% DAR3 or higher.

### Step-3: Analysis of the Purified Conjugate

[0668] The isolated conjugates were characterized by either mass spec or SDS-PAGE. The purity of the conjugate was assessed by analytical HPLC using either anion exchange chromatography method-2 or anion exchange chromatography method-3.

[chemical structure]

Step 1: Antibody Reduction with TCEP

[0669] Antibody was buffer exchanged with borax buffer (pH 8) and made up to 5 mg/ml concentration. To this solution, 2 equivalents of TCEP in water was added and rotated for 2 hours at RT. The resultant reaction mixture was exchanged with pH 7.4 PBS containing 5 mM EDTA and added to a solution of MBS-C6-siRNA-C6-NHCO-PEG-5 kDa (2 equivalents) in pH 7.4 PBS containing 5 mM EDTA at RT and rotated overnight. Analysis of the reaction mixture by analytical SAX column chromatography showed antibody siRNA conjugate along with unreacted antibody and siRNA.

### Step 2: Purification

[0670] The crude reaction mixture was purified by AKTA explorer FPLC using anion exchange chromatography method-1. Fractions containing DAR1 and DAR>2 antibody-siRNA conjugates were separated, concentrated and buffer exchanged with pH 7.4 PBS. Typical DAR>2 cysteine conjugate contains greater than 85% DAR2 and less than 15% DAR3 or higher.

### Step-3: Analysis of the Purified Conjugate

[0671] The isolated conjugates were characterized by either mass spec or SDS-PAGE. The purity of the conjugate was assessed by analytical HPLC using either anion exchange chromatography method-2 or anion exchange chromatography method-3.

[chemical structure]

Step 1: Antibody Reduction with TCEP

[0672] Antibody was buffer exchanged with borax buffer (pH 8) and made up to 5 mg/ml concentration. To this solution, 2 equivalents of TCEP in water was added and rotated for 2 hours at RT. The resultant reaction mixture was exchanged with pH 7.4 PBS containing 5 mM EDTA and added to a solution of MBS-C6-siRNA-C6-NHCO-PEG-5 kDa (2 equivalents) in pH 7.4 PBS containing 5 mM EDTA at RT and rotated overnight. Analysis of the reaction mixture by analytical SAX column chromatography showed antibody siRNA conjugate along with unreacted antibody and siRNA.

### Step 2: Purification

[0673] The crude reaction mixture was purified by AKTA explorer FPLC using anion exchange chromatography method-1. Fractions containing DAR1 and DAR>2 antibody-siRNA conjugates were separated, concentrated and buffer exchanged with pH 7.4 PBS. Typical DAR>2 cysteine conjugate contains greater than 85% DAR2 and less than 15% DAR3 or higher.

### Step-3: Analysis of the Purified Conjugate

[0674] The isolated conjugates were characterized by either mass spec or SDS-PAGE. The purity of the conjugate was assessed by analytical HPLC using either anion exchange chromatography method-2 or anion exchange chromatography method-3.

[chemical structure]

Step 1: Antibody Conjugation with SPDP Linker Followed by SH-siRNA-PEG5 kDa

[0675] Antibody was buffer exchanged with pH 7.4 1×PBS and made up to 10 mg/ml concentration. To this solution, 2 equivalents of SPDP linker [succinimidyl 3-(2-pyridyldithio)propionate] or its methylated version was added and rotated for 4 hours at room temperature. Unreacted SPDP linker was removed by spin filtration using 50 kDa MWCO Amicon spin filters and pH 7.4 PBS buffer. The retentate was collected and 2 equivalents of SH-C6-siRNA-PEG5 kDa in pH 7.4 PBS was added at room temperature and rotated overnight. The reaction mixture was analyzed by analytical SAX column chromatography and the conjugate along with unreacted antibody and siRNA was seen.

### Step 2: Purification

[0676] The crude reaction mixture was purified by AKTA explorer FPLC using anion exchange chromatography method-1. Fractions containing DAR1 and DAR>2 antibody-siRNA conjugates were separated, concentrated and buffer exchanged with pH 7.4 PBS. Typical DAR>2 lysine conjugate contains 70 to 80% DAR2 and 20 to 30% DAR3 or higher.

### Step-3: Analysis of the Purified Conjugate

[0677] The isolated conjugate was characterized by either mass spec or SDS-PAGE. The purity of the conjugate was assessed by analytical HPLC using anion exchange chromatography method-2.

[chemical structure]

Step 1: Antibody Reduction and Conjugation with Pyridyldithio-siRNA-PEG5 kDa

[0678] Antibody was buffer exchanged with pH 8.0 borax buffer and made up to 10 mg/ml concentration. To this solution, 1.5 equivalents of TCEP was added and the reaction mixture was rotated for 1 hour at room temperature. Unreacted TCEP was removed by spin filtration using 50 kDa MWCO Amicon spin filters and buffer exchanged with pH 7.4 PBS buffer. The retentate was collected and 2 equivalents of pyridyldithio-C6-siRNA-PEG5 kDa in pH 7.4 PBS was added at room temperature and rotated overnight. The reaction mixture was analyzed by analytical SAX column chromatography and conjugate along with unreacted antibody and siRNA was seen.

### Step 2: Purification

[0679] The crude reaction mixture was purified by AKTA explorer FPLC using anion exchange chromatography method-1. Fractions containing DAR1 and DAR>2 antibody-siRNA conjugates were separated, concentrated and buffer exchanged with pH 7.4 PBS.

### Step-3: Analysis of the Purified Conjugate

[0680] The isolated conjugate was characterized by either mass spec or SDS-PAGE. The purity of the conjugate was assessed by analytical HPLC using anion exchange chromatography method-2. Typical DAR>2 cysteine conjugate contains 90% DAR2 and 10% DAR3 or higher.

[chemical structure]

Step 1: Antibody Reduction and Conjugation with Maleimide-ECL-siRNA-PEG5 kDa

[0681] Antibody was buffer exchanged with pH 8.0 borax buffer and made up to 10 mg/ml concentration. To this solution, 1.5 equivalents of TCEP (Tris(2-carboxyethyl)phosphine hydrochloride) reagent was added and rotated for 1 hour at room temperature. Unreacted TCEP was removed by spin filtration using 50 kDa MWCO Amicon spin filters and pH 7.4 PBS buffer with 5 mM EDTA. The retentate was collected and 1.5 equivalents of maleimide-ECL-C6-siRNA-PEG5 kDa in pH 7.4 PBS was added at room temperature and rotated overnight. The reaction mixture was analyzed by analytical SAX column chromatography and conjugate along with unreacted antibody and siRNA was seen.

### Step 2: Purification

[0682] The crude reaction mixture was purified by AKTA explorer FPLC using anion exchange chromatography method-1. Fractions containing DAR1 and DAR>2 antibody-siRNA conjugates were separated, concentrated and buffer exchanged with pH 7.4 PBS.

### Step-3: Analysis of the Purified Conjugate

[0683] The isolated conjugate was characterized by either mass spec or SDS-PAGE. The purity of the conjugate was assessed by analytical HPLC using anion exchange chromatography method-2. Typical DAR>2 lysine conjugate contains 70 to 80% DAR2 and 20 to 30% DAR3 or higher.

[chemical structure]

Step 1: Antibody Conjugation with NHS-PEG4-TCO Followed by Methyltetrazine-PEG4-siRNA-PEG5 kDa

[0684] Antibody was buffer exchanged with pH 7.4 PBS and made up to 5 mg/ml concentration. To this solution, 2 equivalents of NHS-PEG4-TCO linker was added and rotated for 4 hours at room temperature. Unreacted linker was removed by spin filtration using 50 kDa MWCO Amicon spin filters and pH 7.4 PBS. The retentate was collected and 2 equivalents of methyltetrazine-PEG4-siRNA-PEG5 kDa in pH 7.4 PBS was added at room temperature. The reaction mixture was analyzed by analytical SAX column chromatography and the antibody-siRNA conjugate was seen along with the unreacted antibody and siRNA.

### Step 2: Purification

[0685] The crude reaction mixture was purified by AKTA explorer FPLC using anion exchange chromatography method-1. Fractions containing DAR1 and DAR>2 antibody-siRNA conjugates were separated, concentrated and buffer exchanged with pH 7.4 PBS. Typical DAR>2 lysine conjugate contains 70-80% DAR2 and 20-30% DAR3 or higher.

### Step-3: Analysis of the Purified Conjugate

[0686] The characterization and purity of the isolated conjugate was characterized by either mass spec or SDS-PAGE. The purity of the conjugate was assessed by analytical HPLC using anion exchange chromatography method-2.

[chemical structure]

### Step 1: Antibody Glycan Modification and Gal-N₃ Addition

[0687] Antibody was buffer exchanged with pH 6.0, 50 mM sodium phosphate buffer and treated with EndoS2 at 37° C. for 16 hrs. The reaction mixture was buffer exchanged into TBS buffer (20 mM Tris, 0.9% NaCl, pH 7.4) and UDP-GalNAz was added followed by MnCl₂, and Gal-T(Y289L) in 50 mM Tris, 5 mM EDTA (pH 8). The final solution contained concentrations of 0.4 mg/mL antibody, 10 mM MnCl₂, 1 mM UDP-GalNAz, and 0.2 mg/mL Gal-T(Y289L) and was incubated overnight at 30° C.

### Step 2: DIBO-PEG-TCO Conjugation to Azide Modified Antibody

[0688] The reaction mixture from step-1 was buffer exchanged with PBS and 2 equivalents of DIBO-PEG4-TCO linker was added and rotated for 6 hours at room temperature. Unreacted linker was removed by spin filtration using 50 kDa MWCO Amicon spin filters and pH 7.4 PBS. The retentate was collected and used as is in step-3.

### Step 3: Methyl Tetrazine-siRNA Conjugation to TCO Labeled Antibody

[0689] 2 equivalents of methyltetrazine-PEG4-siRNA-PEG5 kDa in pH 7.4 PBS was added to the retentate from step-2 and rotated at room temperature for 1 hour. The reaction mixture was analyzed by analytical SAX column chromatography and the antibody-siRNA conjugate was seen along with the unreacted antibody and siRNA.

### Step 4: Purification

[0690] The crude reaction mixture was purified by AKTA explorer FPLC using anion exchange chromatography method-1. Fractions containing DAR1 and DAR>2 antibody-siRNA conjugates were separated, concentrated and buffer exchanged with pH 7.4 PBS. Typical DAR>2 lysine conjugate contains 70-80% DAR2 and 20-30% DAR3 or higher.

### Step-5: Analysis of the Purified Conjugate

[0691] The characterization and purity of the isolated conjugate was characterized by either mass spec or SDS-PAGE. The purity of the conjugate was assessed by analytical HPLC using anion exchange chromatography method-2.

[chemical structure]

Step 1: Antibody Digestion with Pepsin

[0692] Antibody was buffer exchanged with pH 4.0, 20 mM sodium acetate/acetic acid buffer and made up to 5 mg/ml concentration. Immobilized pepsin (Thermo Scientific, Prod #20343) was added and incubated for 3 hours at 37° C. The reaction mixture was filtered using 30 kDa MWCO Amicon spin filters and pH 7.4 PBS. The retentate was collected and purified using size exclusion chromatography to isolate F(ab′)2. The collected F(ab′)2 was then reduced by 10 equivalents of TCEP and conjugated with SMCC-C6-siRNA-PEG5 at room temperature in pH 7.4 PBS. Analysis of reaction mixture on SAX chromatography showed Fab-siRNA conjugate along with unreacted Fab and siRNA-PEG.

### Step 2: Purification

[0693] The crude reaction mixture was purified by AKTA explorer FPLC using anion exchange chromatography method-1. Fractions containing DAR1 and DAR2 Fab-siRNA conjugates were separated, concentrated and buffer exchanged with pH 7.4 PBS.

### Step-3: Analysis of the Purified Conjugate

[0694] The characterization and purity of the isolated conjugate was assessed by SDS-PAGE and analytical HPLC using anion exchange chromatography method-2.

### Purification and Analytical Methods

### Anion Exchange Chromatography Method-1.

[0695] Column: Tosoh Bioscience, TSKGel SuperQ-5PW, 21.5 mm ID×15 cm, 13 um
[0696] Solvent A: 20 mM TRIS buffer, pH 8.0; Solvent B: 20 mM TRIS, 1.5 M NaCl, pH 8.0; Flow Rate: 6.0 ml/min
[0697] Gradient:

| a. | % A | % B | Column Volume |
|---|---|---|---|
| b. | 100 | 0 | 1.00 |
| c. | 60 | 40 | 18.00 |
| d. | 40 | 60 | 2.00 |
| e. | 40 | 60 | 5.00 |
| f. | 0 | 100 | 2.00 |
| g. | 100 | 0 | 2.00 |

### Anion Exchange Chromatography Method-2

[0698] Column: Thermo Scientific, ProPac™ SAX-10, Bio LC™, 4×250 mm
[0699] Solvent A: 80% 10 mM TRIS pH 8, 20% ethanol; Solvent B: 80% 10 mM TRIS pH 8, 20% ethanol, 1.5 M NaCl; Flow Rate: 1.0 ml/min
[0700] Gradient:

| a. | Time | % A | % B |
|---|---|---|---|
| b. | 0.0 | 90 | 10 |
| c. | 3.00 | 90 | 10 |
| d. | 11.00 | 40 | 60 |
| e. | 13.00 | 40 | 60 |
| f. | 15.00 | 90 | 10 |
| g. | 20.00 | 90 | 10 |

### Anion Exchange Chromatography Method-3

[0701] Column: Thermo Scientific, ProPac™ SAX-10, Bio LC™, 4×250 mm
[0702] Solvent A: 80% 10 mM TRIS pH 8, 20% ethanol; Solvent B: 80% 10 mM TRIS pH 8, 20% ethanol, 1.5 M NaCl
[0703] Flow Rate: 0.75 ml/min
[0704] Gradient:

| a. | Time | % A | % B |
|---|---|---|---|
| b. | 0.0 | 90 | 10 |
| c. | 3.00 | 90 | 10 |
| d. | 11.00 | 40 | 60 |
| e. | 23.00 | 40 | 60 |
| f. | 25.00 | 90 | 10 |
| g. | 30.00 | 90 | 10 |

### Size Exclusion Chromatography Method-1

[0705] Column: TOSOH Biosciences, TSKgelG3000SW XL, 7.8×300 mm, 5 M
[0706] Mobile phase: 150 mM phosphate buffer
[0707] Flow Rate: 1.0 ml/min for 20 mins
   siRNA Synthesis

[0708] All siRNA single strands were fully assembled on solid phase using standard phospharamidite chemistry and purified over HPLC. Purified single strands were duplexed to get the double stranded siRNA.

[0709] Each siRNA passenger strand contains two conjugation handles, C6-NH₂ and C6-SH, one at each end of the strand. The passenger strand with C6-NH₂ handle at 5′ end contains C6-SH at its 3′ end and the strand that contains C6-NH₂ handle at 3′ end contains C6-SH at its 5′ end. Both conjugation handles are connected to siRNA passenger strand via inverted abasic phosphodiester or phosphorothioate.

[0710] A representative structure of siRNA with C6-NH₂ conjugation handle at the 5′ end and C6-SH at 3′end of the passenger strand.

[chemical structure]

### ASC Architectures Described in Examples 10-41

[0711] ASC Architecture-1: Antibody-Lys-SMCC-S-3′-Passenger strand. This conjugate was generated by antibody lysine-SMCC conjugation to thiol at the 3′ end of passenger strand.

[chemical structure]

[0712] ASC Architecture-2: Antibody-Cys-SMCC-3′-Passenger strand. This conjugate was generated by antibody inter-chain cysteine conjugation to SMCC at the 3′ end of passenger strand.

[chemical structure]

[0713] ASC Architecture-3: Antibody-Lys-SMCC-S-5′-passenger strand. This conjugate was generated by antibody lysine-SMCC conjugation to C6-thiol at the 5′ end of passenger strand.

[chemical structure]

[0714] ASC Architecture-4: Antibody-Cys-SMCC-5′-passenger strand. This conjugate was generated by antibody inter-chain cysteine conjugation to SMCC at the 5′ end of passenger strand.

[chemical structure]

[0715] ASC Architecture-5: Antibody-Lys-PEG-5′-passenger strand. This conjugate was generated by antibody PEG-TCO conjugation to tetrazine at the 5′ end of passenger strand.

[chemical structure]

[0716] ASC Architecture-6: Antibody-Lys-PEG-5′-passenger strand. This conjugate was generated by antibody PEG-TCO conjugation to tetrazine at the 5′ end of passenger strand.

[chemical structure]

[0717] ASC Architecture-7: Antibody-Cys-PEG-5′-passenger strand without inverted abasic at 5′ end. This conjugate was generated using procedure similar to architecture-2. The antibody was conjugated directly to the amine on passenger strand 5′ end sugar.

[chemical structure]

### Zalutumumab (EGFR-Ab)

[0718] Zalutumumab is a fully human IgG1κ monoclonal antibody directed against the human epidermal growth factor receptor (EGFR). It is produced in the Chinese Hamster Ovary cell line DJT33, which has been derived from the CHO cell line CHO-K1SV by transfection with a GS vector carrying the antibody genes derived from a human anti-EGFR antibody producing hybridoma cell line (2F8). Standard mammalian cell culture and purification technologies are employed in the manufacturing of zalutumumab.

[0719] The theoretical molecular weight (MW) of zalutumumab without glycans is 146.6 kDa. The experimental MW of the major glycosylated isoform of the antibody is 149 kDa as determined by mass spectrometry. Using SDS-PAGE under reducing conditions the MW of the light chain was found to be approximately 25 kDa and the MW of the heavy chain to be approximately 50 kDa. The heavy chains are connected to each other by two inter-chain disulfide bonds, and one light chain is attached to each heavy chain by a single inter-chain disulfide bond. The light chain has two intra-chain disulfide bonds and the heavy chain has four intra-chain disulfide bonds. The antibody is N-linked glycosylated at Asn305 of the heavy chain with glycans composed of N-acetyl-glucosamine, mannose, fucose and galactose. The predominant glycans present are fucosylated bi-antennary structures containing zero or one terminal galactose residue. The charged isoform pattern of the IgG1κ antibody has been investigated using imaged capillary IEF, agarose IEF and analytical cation exchange HPLC. Multiple charged isoforms are found, with the main isoform having an isoelectric point of approximately 8.7.

[0720] The major mechanism of action of zalutumumab is a concentration dependent inhibition of EGF-induced EGFR phosphorylation in A431 cancer cells. Additionally, induction of antibody-dependent cell-mediated cytotoxicity (ADCC) at low antibody concentrations has been observed in pre-clinical cellular in vitro studies.

### Panitumumab (EGFR2-Ab)

[0721] Panitumumab is a clinically approved, fully human IgG2 subclass monoclonal antibody specific to the epidermal growth factor receptor (EGFR). Panitumumab has two gamma heavy chains and two kappa light chains. Glycosylated panitumumab has a total molecular weight of approximately 147 kDa. Panitumumab is expressed as a glycoprotein with a single consensus N-linked glycosylation site located on the heavy chain. Panitumumab is produced from Chinese Hamster Ovary (CHO) cells and purified by a series of chromatography steps, viral inactivation step, viral filtration step and ultrafiltration/diafiltration steps.

[0722] Panitumumab acts as a competitive antagonist at the ligand binding site of EGFR to inhibit binding and signaling mediated by EGF and transforming growth factor α, the natural ligands for this receptor. The affinity of binding panitumumab to the EGFR was determined be 3.5 and 5.7×10⁻¹² M in recombinant EGFR using BIAcore methods. Inhibition of binding of EGF was shown in A431 cells, a human epidermal carcinoma cell line that expresses EGFR. Intracellular acidification, phosphorylation and internalization of the EGFR were blocked in a dose-dependent manner by panitumumab in A431 cells. Panitumumab was also shown to inhibit cell growth in vitro and in vivo in the same cell line.

### Herceptin (EGFR3-Ab)

[0723] Herceptin is a clinically approved, humanized IgG1 subclass monoclonal antibody specific to the epidermal growth factor receptor2 (EGFR2) also known as Her2. Herceptin has human Fc yl isotype along with kappa light chains.

### PSMA-Ab

[0724] PSMA-Ab is a humanized IgG1 subclass monoclonal antibody specific to prostate specific membrane antigen (PSMA).

### ASGR1-Ab

[0725] ASGR mAb-Sino 103 is a rabbit IgG monoclonal antibody that binds mouse asialoglycoprotein receptor1 (ASGPR1). It is supplied by Sino Biologicals Inc. (Cat #50083-R103).

### ASGR2-Ab

[0726] ASGR mAb-R&D is a rat IgG_{2A} subclass monoclonal antibody that binds mouse asialoglycoprotein receptor1 (ASGPR1). It is purified by protein A or G from hybridoma culture supernatant and supplied by R&D Systems (Cat #MAB2755)

siRNA-TriGalNAc Conjugate

[0727] The siRNA triGalNAc conjugate was synthesized using Lys-Lys dipeptide. Protected triGalNAc was coupled with dipeptide PEG linker and purified. After the removal of carboxylic acid protection group on the triGalNAc-dipeptide was conjugated to the 5′ end of siRNA passenger strand.

[chemical structure]

### Example 10: 2016-PK-163-LNCap

siRNA Design and Synthesis

[0728] EFGR: A 21 mer duplex with 19 bases of complementarity and 3′ dinucleotide overhangs was designed against human EGFR. The sequence of the guide/antisense strand was complementary to the gene sequence starting a base position 333 for the human mRNA transcript for EGFR (ACUCGUGCCUUGGCAAACUUU; SEQ ID NO: 2082). Base, sugar and phosphate modifications were used to optimize the potency of the duplex and reduce immunogenicity. All siRNA single strands were fully assembled on solid phase using standard phospharamidite chemistry and purified over HPLC. Purified single strands were duplexed to obtain the double stranded siRNA. The passenger strand contained two conjugation handles, a C6-NH₂ at the 5′ end and a C6-SH at the 3′ end. Both conjugation handles were connected to siRNA passenger strand via phosphorothioate-inverted abasic-phosphorothioate linker, see Example 9 for the chemical structure.

[0729] Negative control siRNA sequence (scramble): A published (Burke et al. (2014) Pharm. Res., 31(12):3445-60) 21 mer duplex with 19 bases of complementarity and 3′ dinucleotide overhangs was used. The sequence (5′ to 3′) of the guide/antisense strand was UAUCGACGUGUCCAGCUAGUU (SEQ ID NO: 2116). Base, sugar and phosphate modifications were used to reduce immunogenicity and were comparable to those used in the active siRNA. All siRNA single strands were fully assembled on solid phase using standard phospharamidite chemistry and purified over HPLC. Purified single strands were duplexed to get the double stranded siRNA. The passenger strand contained two conjugation handles, a C6-NH₂ at the 5′ end and a C6-SH at the 3′ end. Both conjugation handles were connected to siRNA passenger strand via a phosphodiester-inverted abasic-phosphodiester linker, see Example 9 for the chemical structure.

### ASC Synthesis and Characterization

[0730] The AXBYC conjugate used in groups 3-4 were made and purified as a DAR1 (n=1) using ASC architecture-4, as described in Example 9. The AXB and AXCYB conjugates were made as described in Example 9.

### In Vivo Study Design

[0731] Groups (n=5) of female SCID SHO mice bearing subcutaneous flank LNCaP tumors 100-350 mm³ in volume were treated with one intravenous (i.v.) tail vein injection of siRNA conjugate, while control groups (n=5) of the same mice received one i.v. injection of PBS as a vehicle control. Treatment groups 1-6 were dosed at 1.0 or 0.5 mg/kg (based on the weight of siRNA) as per the study design below. All groups (treatments and controls) were administered a dose volume of 5 mL/kg. Mice were sacrificed by CO₂ asphyxiation at 96 hours post-dose. Table 22 describes the study design in more detail. 50 mg pieces of tumor and liver, were collected and snap-frozen in liquid nitrogen. mRNA knockdown in target tissue was determined using a comparative qPCR assay as described in Example 2. Total RNA was extracted from the tissue, reverse transcribed and mRNA levels were quantified using TaqMan qPCR, using the appropriately designed primers and probes. PPIB (housekeeping gene) was used as an internal RNA loading control, results were calculated by the comparative Ct method, where the difference between the target gene Ct value and the PPIB Ct value (ΔCt) is calculated and then further normalized relative to the PBS control group by taking a second difference (ΔΔCt). Quantitation of tissue siRNA concentrations were determined using a stem-loop qPCR assay as described in Example 2. The antisense strand of the siRNA was reverse transcribed using a TaqMan MicroRNA reverse transcription kit using a sequence-specific stem-loop RT primer. The cDNA from the RT step was then utilized for real-time PCR and Ct values were transformed into plasma or tissue concentrations using the linear equations derived from the standard curves.

TABLE 22

| | | | siRNA | | Dose | # | Harvest |
|---|---|---|---|---|---|---|---|
| | | | Dose | | Volume | of | Time |
| Group | Test Article | N | (mg/kg) | ROA | (mL/kg) | Doses | (h) |
| 1 | PSMA-Ab(Cys)-EGFR (n = 1) | 5 | 1 | IV | 5.0 | 1 | 96 |
| 2 | PSMA-Ab(Cys)-EGFR (n = 1) | 5 | 0.5 | IV | 5.0 | 1 | 96 |
| 3 | PSMA-Ab(Cys)-EGFR-PEG5k (n = 1) | 5 | 1 | IV | 5.0 | 1 | 96 |
| 4 | PSMA-Ab(Cys)-EGFR-PEG5k (n = 1) | 5 | 0.5 | IV | 5.0 | 1 | 96 |
| 5 | PSMA-Ab(Cys)-PEG5k-EGFR (n = 1) | 5 | 1 | IV | 5.0 | 1 | 96 |
| 6 | PSMA-Ab(Cys)-PEG5k-EGFR (n = 1) | 5 | 0.5 | IV | 5.0 | 1 | 96 |
| 7 | PSMA-Ab(Cys)-scramble-PEG5k | 5 | 1 | IV | 5.0 | 1 | 96 |
| | (n = 1) | | | | | | |
| 8 | PBS Control | 5 | — | IV | 5.0 | 1 | 96 |

| | | |
|---|---|---|
| Total # of Animals: | 40 | SCID SHO mice with |
| | | LNCaP tumors |

[0732] The orientation of the siRNA and PEG relative to the PSMA-Ab was explored in an in vivo mouse tumor model. As illustrated in FIG. 50A, having the siRNA in between the PSMA-Ab and the PEG5k (PSMA-Ab(Cys)-EGFR-PEG5k or the AXBYC format) resulted in higher levels of EGFR mRNA knockdown in the tumor relative to the alternative conjugate where PEG5k is in between the PSMA-Ab and the siRNA (PSMA-Ab(Cys)-PEG5k-EGFR or AXCYB format). This approach (AXBYC) also resulted in higher levels of EGFR mRNA knockdown in the tumor relative to the conjugate without PEG5K (PSMA-Ab(Cys)-EGFR or AXB format).

[0733] The orientation of the siRNA and PEG relative to the PSMA-Ab was also explored relative to the tissue PK profiles. Tissue concentrations were measured pmol/g and then converted to pmol/mL by assuming the density of tissue equals 1 g/mL (a concentration of 1 nM=1 nmol/L=1 pmol/mL=1 pmol/g tissue). As illustrated in FIG. 50B, having the siRNA in between the PSMA-Ab and the PEG5k (AXBYC) resulted in higher levels of siRNA delivery to the tumor relative to the alternative conjugate where PEG5k is in between the PSMA-Ab and the siRNA (AXCYB). This approach (AXBYC) resulted in higher levels of EGFR siRNA delivery to the tumor relative to the conjugate without PEG5K (AXB).

[0734] In a mouse LNCaP subcutaneous xenograph model, it was demonstrated that the AXBYC format for the antibody siRNA conjugate resulted in higher levels of siRNA accumulation in the tumor tissue and a greater magnitude of EGFR mRNA knockdown, relative to the AXCYB and AXB formats. The LNCap tumor expresses human PSMA, resulting in tumor tissue specific accumulation of the PSMA targeted siRNA conjugates after i.v. administration, receptor mediate uptake and siRNA facilitated knockdown of the target gene.

### Example 11: 2016-PK-202-LNCap

siRNA Design and Synthesis

[0735] EFGR: A 21 mer duplex with 19 bases of complementarity and 3′ dinucleotide overhangs was designed against human EGFR. The sequence of the guide/antisense strand was complementary to the gene sequence starting a base position 333 for the human mRNA transcript for EGFR (ACUCGUGCCUUGGCAAACUUU; SEQ ID NO: 2082). Base, sugar and phosphate modifications were used to optimize the potency of the duplex and reduce immunogenicity. All siRNA single strands were fully assembled on solid phase using standard phospharamidite chemistry and purified over HPLC. Purified single strands were duplexed to get the double stranded siRNA. The passenger strand contained two conjugation handles, a C6-NH₂ at the 5′ end and a C6-SH at the 3′ end. Both conjugation handles were connected to siRNA passenger strand via phosphorothioate-inverted abasic-phosphorothioate linker, see Example 9 for the chemical structure.

[0736] Negative control siRNA sequence (scramble): A published (Burke et al. (2014) Pharm. Res., 31(12):3445-60) 21 mer duplex with 19 bases of complementarity and 3′ dinucleotide overhangs was used. The sequence (5′ to 3′) of the guide/antisense strand was UAUCGACGUGUCCAGCUAGUU (SEQ ID NO: 2116). Base, sugar and phosphate modifications were used to reduce immunogenicity and were comparable to those used in the active siRNA. All siRNA single strands were fully assembled on solid phase using standard phospharamidite chemistry and purified over HPLC. Purified single strands were duplexed to get the double stranded siRNA. The passenger strand contained two conjugation handles, a C6-NH₂ at the 5′ end and a C6-SH at the 3′ end. Both conjugation handles were connected to siRNA passenger strand via a phosphodiester-inverted abasic-phosphodiester linker, see Example 9 for the chemical structure.

### ASC Synthesis and Characterization

[0737] The AXBYC conjugate used in groups 3-5 and 7 was made and purified as a DAR1 (n=1) using ASC architecture-4, as described in Example 9. The AXB (groups 1-2) and AXCYB (group 6) conjugates were made as described in Example 9.

### In Vivo Study Design

[0738] Groups (n=5) of female SCID SHO mice bearing subcutaneous flank LNCaP tumors 100-350 mm³ in volume were treated with one intravenous (i.v.) tail vein injection of siRNA conjugate, while control groups (n=5) of the same mice received one i.v. injection of PBS as a vehicle control. Treatment groups 1-6 were dosed at 1.0 or 0.5 mg/kg (based on the weight of siRNA) as per the study design below. All groups (treatments and controls) were administered a dose volume of 5 mL/kg. Mice were sacrificed by CO₂ asphyxiation at 96 hours post-dose. Table 23 describes the study design in more detail. 50 mg pieces of tumor and liver, were collected and snap-frozen in liquid nitrogen. mRNA knockdown in target tissue was determined using a comparative qPCR assay as described in Example 2. Total RNA was extracted from the tissue, reverse transcribed and mRNA levels were quantified using TaqMan qPCR, using the appropriately designed primers and probes. PPIB (housekeeping gene) was used as an internal RNA loading control, results were calculated by the comparative Ct method, where the difference between the target gene Ct value and the PPIB Ct value (ΔCt) is calculated and then further normalized relative to the PBS control group by taking a second difference (ΔΔCt). Quantitation of tissue siRNA concentrations were determined using a stem-loop qPCR assay as described in Example 2. The antisense strand of the siRNA was reverse transcribed using a TaqMan MicroRNA reverse transcription kit using a sequence-specific stem-loop RT primer. The cDNA from the RT step was then utilized for real-time PCR and Ct values were transformed into plasma or tissue concentrations using the linear equations derived from the standard curves.

TABLE 23

| | | | siRNA | | Dose | | Harvest |
|---|---|---|---|---|---|---|---|
| | | | Dose | | Volume | # of | Time |
| Group | Test Article | N | (mg/kg) | ROA | (mL/kg) | Doses | (h) |
| 1 | PSMA-Ab(Cys)-EGFR (n = 1) | 5 | 1 | IV | 5.0 | 1 | 96 |
| 2 | PSMA-Ab(Cys)-EGFR (n = 1) | 5 | 0.5 | IV | 5.0 | 1 | 96 |
| 3 | PSMA-Ab(Cys)-EGFR-PEG5k (n = 1) | 5 | 1 | IV | 5.0 | 1 | 96 |
| 4 | PSMA-Ab(Cys)-EGFR-PEG5k (n = 1) | 5 | 0.5 | IV | 5.0 | 1 | 96 |
| 5 | PSMA-Ab(Cys)-EGFR-PEG5k (n = 1) | 5 | 0.25 | IV | 5.0 | 1 | 96 |
| 6 | PSMA-Ab(Cys)-PEG5k-EGFR (n = 1) | 5 | 0.5 | IV | 5.0 | 1 | 96 |
| 7 | PSMA-Ab(Cys)-scramble-PEG5k (n = 1) | 5 | 1 | IV | 5.0 | 1 | 96 |
| 8 | PBS Control | 5 | — | IV | 5.0 | 1 | 96 |

| | | |
|---|---|---|
| Total # of Animals: | 40 | SCID SHO mice with |
| | | LNCaP tumors |

[0739] The orientation of the siRNA and PEG relative to the PSMA-Ab was also explored in an in vivo mouse tumor model. As illustrated in FIG. 51A, having the siRNA in between the PSMA-Ab and the PEG5k (PSMA-Ab(Cys)-EGFR-PEG5k or AXBYC format)) resulted in higher levels of EGFR mRNA knockdown in the tumor relative to the alternative conjugate where PEG5k is in between the PSMA-Ab and the siRNA (PSMA-Ab(Cys)-PEG5k-EGFR or AXCYB format). This approach (AXBYC) also resulted in higher levels of EGFR mRNA knockdown in the tumor relative to the conjugate without PEG5K (PSMA-Ab(Cys)-EGFR or AXB format).

[0740] The orientation of the siRNA and PEG relative to the PSMA-Ab was also explored relative to the tissue PK profiles. Tissue concentrations were measured pmol/g and then converted to pmol/mL by assuming the density of tissue equals 1 g/mL (a concentration of 1 nM=1 nmol/L=1 pmol/mL=1 pmol/g tissue). As illustrated in FIG. 51B, having the siRNA in between the PSMA-Ab and the PEG5k (PSMA-Ab(Cys)-EGFR-PEG5k or AXBYC) resulted in higher levels of siRNA delivery to the tumor relative to the alternative conjugate where PEG5k is in between the PSMA-Ab and the siRNA (PSMA-Ab(Cys)-PEG5k-EGFR or AXCYB). This approach (AXBYC) also resulted in higher levels of EGFR siRNA delivery to the tumor relative to the conjugate without PEG5K (PSMA-Ab(Cys)-EGFR or AXB).

[0741] In a mouse LNCaP subcutaneous xenograph model, it was demonstrated that the AXBYC format for the antibody siRNA conjugate results in higher levels of siRNA accumulation in the tumor tissue and a greater magnitude of EGFR mRNA knockdown, relative to the AXCYB and AXB formats. The LNCap tumor expresses human PSMA, resulting in tumor tissue specific accumulation of the PSMA targeted siRNA conjugates after i.v. administration, receptor mediate uptake and siRNA facilitated knockdown of the target gene.

### Example 12: 2016-PK-219-WT

siRNA Design and Synthesis

[0742] EFGR: A 21 mer duplex with 19 bases of complementarity and 3′ dinucleotide overhangs was designed against human EGFR. The sequence of the guide/antisense strand was complementary to the gene sequence starting a base position 333 for the human mRNA transcript for EGFR (ACUCGUGCCUUGGCAAACUUU; SEQ ID NO: 2082)). Base, sugar and phosphate modifications were used to optimize the potency of the duplex and reduce immunogenicity. All siRNA single strands were fully assembled on solid phase using standard phospharamidite chemistry and purified over HPLC. Purified single strands were duplexed to get the double stranded siRNA. The passenger strand contained two conjugation handles, a C6-NH₂ at the 5′ end and a C6-SH at the 3′ end. Both conjugation handles were connected to siRNA passenger strand via phosphorothioate-inverted abasic-phosphorothioate linker, see Example 9 for the chemical structure.

[0743] Negative control siRNA sequence (scramble): A published (Burke et al. (2014) Pharm. Res., 31(12):3445-60) 21 mer duplex with 19 bases of complementarity and 3′ dinucleotide overhangs was used. The sequence (5′ to 3′) of the guide/antisense strand was UAUCGACGUGUCCAGCUAGUU (SEQ ID NO: 2116). Base, sugar and phosphate modifications were used to reduce immunogenicity and were comparable to those used in the active siRNA. All siRNA single strands were fully assembled on solid phase using standard phospharamidite chemistry and purified over HPLC. Purified single strands were duplexed to get the double stranded siRNA. The passenger strand contained two conjugation handles, a C6-NH₂ at the 5′ end and a C6-SH at the 3′ end. Both conjugation handles were connected to siRNA passenger strand via a phosphodiester-inverted abasic-phosphodiester linker, see Example 9 for the chemical structure.

### ASC Synthesis and Characterization

[0744] The AXBYC conjugate used in groups 4-6 was made and purified as a DAR1 (n=1) using ASC architecture-4, as described in Example 9. The AXB (groups 1-3) and AXCYB (groups 7-9) and BYC (groups 10-12) conjugates were made as described in Example 9.

### In Vivo Study Design

[0745] Groups (n=4) of wild-type female CD-1 mice were treated with one intravenous (i.v.) tail vein injections of siRNA conjugates. Treatment groups received 0.5 mg/kg (based on the weight of siRNA) and all groups were administered a dose volume of 5.0 mL/kg. Table 24 illustrates the study design in more detail. Non-terminal blood samples were collected at 5, 30, and 180 minutes post-dose via puncture of the retro-orbital plexus and centrifuged to generate plasma for PK analysis. Mice were sacrificed by CO₂ asphyxiation at 24, 96, or 168 h post-dose. Terminal blood samples were collected via cardiac puncture and processed to generate plasma for PK analysis. Quantitation of plasma siRNA concentrations were determined using a stem-loop qPCR assay as described in Example 2. The antisense strand of the siRNA was reverse transcribed using a TaqMan MicroRNA reverse transcription kit using a sequence-specific stem-loop RT primer. The cDNA from the RT step was then utilized for real-time PCR and Ct values were transformed into plasma or tissue concentrations using the linear equations derived from the standard curves.

TABLE 24

| | | | siRNA | | # | | Survival | Terminal |
|---|---|---|---|---|---|---|---|---|
| | | | Dose | | of | Dose | Bleed | Bleed |
| Group | Test Article | N | (mg/kg) | ROA | Doses | Schedule | (min) | (h) |
| 1 | EGFR-Ab(Cys)-EGFR | 4 | 0.5 | IV | 1 | t = 0 | 5 | 24 |
| 2 | (n = 1) | 4 | 0.5 | IV | 1 | t = 0 | 30 | 96 |
| 3 | | 4 | 0.5 | IV | 1 | t = 0 | 180 | 168 |
| 4 | EGFR-Ab(Cys)-EGFR- | 4 | 0.5 | IV | 1 | t = 0 | 5 | 24 |
| 5 | PEG5k (n = 1) | 4 | 0.5 | IV | 1 | t = 0 | 30 | 96 |
| 6 | | 4 | 0.5 | IV | 1 | t = 0 | 180 | 168 |
| 7 | EGFR-Ab(Cys)-PEG5k- | 4 | 0.5 | IV | 1 | t = 0 | 5 | 24 |
| 8 | EGFR (n = 1) | 4 | 0.5 | IV | 1 | t = 0 | 30 | 96 |
| 9 | | 4 | 0.5 | IV | 1 | t = 0 | 180 | 168 |
| 10 | EGFR Alone (aka | 4 | 0.5 | IV | 1 | t = 0 | 5 | 24 |
| 11 | EGFR-PEG5k) | 4 | 0.5 | IV | 1 | t = 0 | 30 | 96 |
| 12 | | 4 | 0.5 | IV | 1 | t = 0 | 180 | 168 |

| | | |
|---|---|---|
| Total # of Animals: | 48 | WT mice CD-1 |

[0746] In this in vivo PK experiment the orientation of the siRNA and PEG relative to the EGFR-Ab was explored to determine the behavior of the mAb-siRNA conjugate in plasma. As illustrated in FIG. 52, all the mAb-siRNA conjugates (AXB, AXBYC and AXCYB formats) had comparable plasma PK with approximately 10% of the siRNA remaining in the systemic circulation after 168 hours (7 days), compared to the siRNA-PEG5K (BYC format) which was rapidly cleared from the plasma.

[0747] The AXBYC format for the antibody siRNA conjugate has improved PK properties relative the siRNA-PEG conjugate (BYC) which was rapidly cleared from the plasma.

### Example 13: 2016-PK-199-HCC827

siRNA Design and Synthesis

[0748] EFGR: A 21 mer duplex with 19 bases of complementarity and 3′ dinucleotide overhangs was designed against human EGFR. The sequence of the guide/antisense strand was complementary to the gene sequence starting a base position 333 for the human mRNA transcript for EGFR (ACUCGUGCCUUGGCAAACUUU; SEQ ID NO: 2082)). Base, sugar and phosphate modifications were used to optimize the potency of the duplex and reduce immunogenicity. All siRNA single strands were fully assembled on solid phase using standard phospharamidite chemistry and purified over HPLC. Purified single strands were duplexed to get the double stranded siRNA.

[0749] Negative control siRNA sequence (scramble): A published (Burke et al. (2014) Pharm. Res., 31(12):3445-60) 21 mer duplex with 19 bases of complementarity and 3′ dinucleotide overhangs was used. The sequence (5′ to 3′) of the guide/antisense strand was UAUCGACGUGUCCAGCUAGUU (SEQ ID NO: 2116). The same base, sugar and phosphate modifications that were used for the active EGFR siRNA duplex were used in the negative control siRNA. All siRNA single strands were fully assembled on solid phase using standard phospharamidite chemistry and purified over HPLC. Purified single strands were duplexed to get the double stranded siRNA.

### ASC Synthesis and Characterization

[0750] All conjugates were made and purified as a DAR1 (n=1) using ASC architecture-4, as described in Example 9.

### In Vivo Study Design

[0751] Groups (n=5) of female NCr nu/nu mice bearing subcutaneously (SC) flank HCC827 tumors 100-300 mm³ in volume were treated with one intravenous (i.v.) tail vein injection of siRNA conjugate, while control groups (n=5) of the same mice received one i.v. injection of PBS as a vehicle control. Treatment groups 1-3 and 4-6 were dosed at 1.0, 0.5 or 0.25 mg/kg (based on the weight of siRNA) as per the study design below. As described in Example 9, groups 1-3 contained the same targeting antibody, but groups 4-6 had a different EGFR targeting antibody, while the rest of the conjugate components (linker, siRNA and PEG) were identical. Group 7 received an antibody conjugate with a negative control siRNA sequence (scramble) as a control for groups 1. All groups (treatments and controls) were administered a dose volume of 5 mL/kg. Mice were sacrificed by CO₂ asphyxiation at 96 hours post-dose. Table 25 describes the study design in more detail. 50 mg pieces of tumor and liver, were collected and snap-frozen in liquid nitrogen. mRNA knockdown in target tissue was determined using a comparative qPCR assay as described in Example 2. Total RNA was extracted from the tissue, reverse transcribed and mRNA levels were quantified using TaqMan qPCR, using the appropriately designed primers and probes. PPIB (housekeeping gene) was used as an internal RNA loading control, results were calculated by the comparative Ct method, where the difference between the target gene Ct value and the PPIB Ct value (ΔCt) is calculated and then further normalized relative to the PBS control group by taking a second difference (ΔΔCt). Quantitation of tissue siRNA concentrations were determined using a stem-loop qPCR assay as described in Example 2. The antisense strand of the siRNA was reverse transcribed using a TaqMan MicroRNA reverse transcription kit using a sequence-specific stem-loop RT primer. The cDNA from the RT step was then utilized for real-time PCR and Ct values were transformed into plasma or tissue concentrations using the linear equations derived from the standard curves.

TABLE 25

| | | | siRNA | | Dose | # | Harvest |
|---|---|---|---|---|---|---|---|
| | | | Dose | | Volume | of | Time |
| Group | Test Article | N | (mg/kg) | ROA | (mL/kg) | Doses | (h) |
| 1 | EGFR-Ab(Cys)-EGFR-PEG5k | 5 | 1 | IV | 5.0 | 1 | 96 |
| | (n = 1) | | | | | | |
| 2 | EGFR-Ab(Cys)-EGFR-PEG5k | 5 | 0.5 | IV | 5.0 | 1 | 96 |
| | (n = 1) | | | | | | |
| 3 | EGFR-Ab(Cys)-EGFR-PEG5k | 5 | 0.25 | IV | 5.0 | 1 | 96 |
| | (n = 1) | | | | | | |
| 4 | EGFR2-Ab(Cys)-EGFR-PEG5k | 5 | 1 | IV | 5.0 | 1 | 96 |
| | (n = 1) | | | | | | |
| 5 | EGFR2-Ab(Cys)-EGFR-PEG5k | 5 | 0.5 | IV | 5.0 | 1 | 96 |
| | (n = 1) | | | | | | |
| 6 | EGFR2-Ab(Cys)-EGFR-PEG5k | 5 | 0.25 | IV | 5.0 | 1 | 96 |
| | (n = 1) | | | | | | |
| 7 | EGFR-Ab(Cys)-scramble-PEG5k | 5 | 1 | IV | 5.0 | 1 | 96 |
| | (n = 1) | | | | | | |
| 8 | PBS Control | 5 | — | IV | 5.0 | 1 | 96 |

| | | |
|---|---|---|
| Total # of Animals: | 40 | nu/nu mice with HCC827 tumors |

[0752] siRNA concentrations were determined 96 hours in the tumor and liver after a single i.v. injection at 1.0, 0.5 and 0.25 mg/kg. Tissue concentrations were measured pmol/g and then converted to pmol/mL by assuming the density of tissue equals 1 g/mL. In FIG. 53A, a concentration of 1 nM=1 nmol/L=1 pmol/mL=1 pmol/g tissue. As illustrated in FIG. 53A, both antibody conjugates were capable of delivering higher levels of siRNA to the tumor relative to the liver, and a dose response was observed. The EGFR antibody conjugate was capable of delivering more siRNA to the tumor tissue, at all the doses tested, relative to the EGFR2 antibody. See FIG. 53B. Both conjugates were capable of EGFR gene specific mRNA knockdown at 96 hours post-administration. The control conjugate that contained the scrambled siRNA and the PBS vehicle control did not produce significant EGFR gene specific mRNA knockdown.

[0753] As highlighted in FIG. 54, biological activity was demonstrated with the A-X—B—Y—C conjugate with a range of different antibodies and siRNA cargos that are capable of in vivo biological activity in a range of different tissue targets. In this example, it was demonstrated that tumor specific accumulation of 2 conjugates targeted with two different EGFR antibodies conjugated to an siRNA designed to down regulate EGFR mRNA. The HCC827 tumor expresses high levels of human EGFR and both conjugates have a human specific EGFR antibody to target the siRNA, resulting in tumor tissue specific accumulation of the conjugates. Receptor mediate uptake resulted in siRNA mediated knockdown of the target gene.

### Example 14: 2016-PK-236-HCC827

siRNA Design and Synthesis

[0754] EFGR: A 21 mer duplex with 19 bases of complementarity and 3′ dinucleotide overhangs was designed against human EGFR. The sequence of the guide/antisense strand was complementary to the gene sequence starting a base position 333 for the human mRNA transcript for EGFR (ACUCGUGCCUUGGCAAACUUU; SEQ ID NO: 2082). Base, sugar and phosphate modifications were used to optimize the potency of the duplex and reduce immunogenicity. All siRNA single strands were fully assembled on solid phase using standard phospharamidite chemistry and purified over HPLC. Purified single strands were duplexed to get the double stranded siRNA. The passenger strand contained two conjugation handles, a C6-NH₂ at the 5′ end and a C6-SH at the 3′ end. Both conjugation handles were connected to siRNA passenger strand via phosphorothioate-inverted abasic-phosphorothioate linker, see Example 9 for the chemical structure.

[0755] Negative control siRNA sequence (scramble): A published (Burke et al. (2014) Pharm. Res., 31(12):3445-60) 21 mer duplex with 19 bases of complementarity and 3′ dinucleotide overhangs was used. The sequence (5′ to 3′) of the guide/antisense strand was UAUCGACGUGUCCAGCUAGUU (SEQ ID NO: 2116). Base, sugar and phosphate modifications were used to reduce immunogenicity and were comparable to those used in the active siRNA. All siRNA single strands were fully assembled on solid phase using standard phospharamidite chemistry and purified over HPLC. Purified single strands were duplexed to get the double stranded siRNA. The passenger strand contained two conjugation handles, a C6-NH₂ at the 5′ end and a C6-SH at the 3′ end. Both conjugation handles were connected to siRNA passenger strand via a phosphodiester-inverted abasic-phosphodiester linker, see Example 9 for the chemical structure.

### ASC Synthesis and Characterization

[0756] All conjugates were made and purified as a DAR1 (n=1) using ASC architecture-4, as described in Example 9.

### In Vivo Study Design

[0757] Groups (n=5) of female NCr nu/nu mice bearing subcutaneously (SC) flank HCC827 tumors 100-300 mm³ in volume were treated with one intravenous (i.v.) tail vein injection of siRNA conjugate, while control group 6 (n=5) of the same mice received one i.v. injection of PBS as a vehicle control. Treatment groups 1-3 were dosed at 1.0, 0.5 or 0.25 mg/kg (based on the weight of siRNA), groups 4 and 5 at 1.0 mg/kg, as per the study design below. As described in Example 9, groups 1-3 contained the same targeting antibody, but groups 4 had a different EGFR targeting antibody, while the rest of the conjugate components (linker, siRNA and PEG) were identical. Group 6 received an antibody conjugate with a negative control siRNA sequence (scramble) as a control for groups 5. All groups (treatments and controls) were administered a dose volume of 5 mL/kg. Mice were sacrificed by CO₂ asphyxiation at 96 hours post-dose. Table 26 describes the study design in more detail. 50 mg pieces of tumor and liver, were collected and snap-frozen in liquid nitrogen. mRNA knockdown in target tissue was determined using a comparative qPCR assay as described in Example 2. Total RNA was extracted from the tissue, reverse transcribed and mRNA levels were quantified using TaqMan qPCR, using the appropriately designed primers and probes. PPIB (housekeeping gene) was used as an internal RNA loading control, results were calculated by the comparative Ct method, where the difference between the target gene Ct value and the PPIB Ct value (ΔCt) is calculated and then further normalized relative to the PBS control group by taking a second difference (ΔΔCt).

TABLE 26

| | | | siRNA | | Dose | | Har- |
|---|---|---|---|---|---|---|---|
| | | | Dose | | Volume | # | vest |
| | | | (mg/ | | (mL/ | of | Time |
| Group | Test Article | N | kg) | ROA | kg) | Doses | (h) |
| 1 | EGFR3-Ab(Cys)- | 5 | 1 | IV | 5.0 | 1 | 96 |
| | EGFR-PEG5k | | | | | | |
| | (n = 1) | | | | | | |
| 2 | EGFR3-Ab(Cys)- | 5 | 0.5 | IV | 5.0 | 1 | 96 |
| | EGFR-PEG5k | | | | | | |
| | (n = 1) | | | | | | |
| 3 | EGFR3-Ab(Cys)- | 5 | 0.25 | IV | 5.0 | 1 | 96 |
| | EGFR-PEG5k | | | | | | |
| | (n = 1) | | | | | | |
| 4 | EGFR-Ab(Cys)- | 5 | 1 | IV | 5.0 | 1 | 96 |
| | EGFR-PEG5k | | | | | | |
| | (n = 1) | | | | | | |
| 5 | EGFR-Ab(Cys)- | 5 | 1 | IV | 5.0 | 1 | 96 |
| | scramble- | | | | | | |
| | PEG5k (n = 1) | | | | | | |
| 6 | PBS Control | 5 | — | IV | 5.0 | 1 | 96 |

| | | |
|---|---|---|
| Total # of Animals: | 30 | nu/nu mice with HCC827 tumors |

[0758] In this in vivo PD experiment, it was demonstrated that dose dependent EGFR gene specific mRNA knockdown (FIG. 55) at 96 hour's post-administration with a third example of an EGFR antibody targeting agent (EGFR3). The control conjugate that contained the scrambled siRNA and the PBS vehicle control did not produce significant EGFR gene specific mRNA knockdown.

[0759] As highlighted in FIG. 54, it was demonstrated that biological activity with the A-X—B—Y—C conjugate with a range of different antibodies and siRNA cargos that are capable of in vivo biological activity in a range of different tissue targets. In this example, it was demonstrated that tumor specific down regulation of EGFR mRNA using a third EGFR antibody targeting ligand. The HCC827 tumor expresses human EGFR and both conjugates have a human specific EGFR antibody (EGFR and EGFR3) to target the siRNA, resulting in tumor tissue specific accumulation of the conjugates. Receptor mediate uptake resulted in siRNA mediated knockdown of the target gene.

### Example 15: 2016-PK-234-HCC827

siRNA Design and Synthesis

[0760] EFGR: A 21 mer duplex with 19 bases of complementarity and 3′ dinucleotide overhangs was designed against human EGFR. The sequence (5′ to 3′) of the guide/antisense strand was TCUCGUGCCUUGGCAAACUUU (SEQ ID NO: 2117) and it was design to be complementary to the gene sequence starting a base position 333 for the human mRNA transcript for EGFR. Base, sugar and phosphate modifications were used to optimize the potency of the duplex and reduce immunogenicity. All siRNA single strands were fully assembled on solid phase using standard phospharamidite chemistry and purified over HPLC. Purified single strands were duplexed to get the double stranded siRNA. The passenger strand contained two conjugation handles, a C6-NH₂ at the 5′ end and a C6-SH at the 3′ end. Both conjugation handles were connected to siRNA passenger strand via phosphorothioate-inverted abasic-phosphorothioate linker, see Example 9 for the chemical structure.

[0761] Negative control siRNA sequence (scramble): A published (Burke et al. (2014) Pharm. Res., 31(12):3445-60) 21 mer duplex with 19 bases of complementarity and 3′ dinucleotide overhangs was used. The sequence (5′ to 3′) of the guide/antisense strand was UAUCGACGUGUCCAGCUAGUU (SEQ ID NO: 2116). Base, sugar and phosphate modifications were used to reduce immunogenicity and were comparable to those used in the active siRNA. All siRNA single strands were fully assembled on solid phase using standard phospharamidite chemistry and purified over HPLC. Purified single strands were duplexed to get the double stranded siRNA. The passenger strand contained two conjugation handles, a C6-NH₂ at the 5′ end and a C6-SH at the 3′ end. Both conjugation handles were connected to siRNA passenger strand via a phosphodiester-inverted abasic-phosphodiester linker, see Example 9 for the chemical structure.

### ASC Synthesis and Characterization

[0762] All conjugates were made and purified as a DAR1 (n=1) using ASC architecture-4, as described in Example 9.

### In Vivo Study Design

[0763] Groups (n=5) of female NCr nu/nu mice bearing subcutaneously (SC) flank HCC827 tumors 100-300 mm³ in volume were treated with one intravenous (i.v.) tail vein injection of siRNA conjugate, while control group 10 (n=5) of the same mice received one i.v. injection of PBS as a vehicle control. Treatment groups 1-3, 4-6 and 7-9 were dosed at 1.0, 0.5 or 0.25 mg/kg (based on the weight of siRNA), as per the study design below. As described in Example 9, groups 1-3 contained the same targeting antibody (EGFR3) but groups 4-9 had a different EGFR targeting antibody, while the rest of the conjugate components (linker, siRNA and PEG) were identical. Group 7-9 received an antibody conjugate with a negative control siRNA sequence (scramble) as a control for groups 1-6. All groups (treatments and controls) were administered a dose volume of 5 mL/kg. Mice were sacrificed by CO₂ asphyxiation at 96 hours post-dose. Table 27 describes the study design in more detail. 50 mg pieces of tumor and liver, were collected and snap-frozen in liquid nitrogen. mRNA knockdown in target tissue was determined using a comparative qPCR assay as described in Example 2. Total RNA was extracted from the tissue, reverse transcribed and mRNA levels were quantified using TaqMan qPCR, using the appropriately designed primers and probes. PPIB (housekeeping gene) was used as an internal RNA loading control, results were calculated by the comparative Ct method, where the difference between the target gene Ct value and the PPIB Ct value (ΔCt) is calculated and then further normalized relative to the PBS control group by taking a second difference (ΔΔCt). Quantitation of tissue siRNA concentrations were determined using a stem-loop qPCR assay as described in Example 2. The antisense strand of the siRNA was reverse transcribed using a TaqMan MicroRNA reverse transcription kit using a sequence-specific stem-loop RT primer. The cDNA from the RT step was then utilized for real-time PCR and Ct values were transformed into plasma or tissue concentrations using the linear equations derived from the standard curves.

TABLE 27

| | | | siRNA | | Dose | | Harvest |
|---|---|---|---|---|---|---|---|
| | | | Dose | | Volume | # of | Time |
| Group | Test Article | N | (mg/kg) | ROA | (mL/kg) | Doses | (h) |
| 1 | EGFR3-Ab(Cys)-N3′-EGFR-5′S- | 5 | 1 | IV | 5.0 | 1 | 96 |
| | PEG5k (n = 1) | | | | | | |
| 2 | EGFR3-Ab(Cys)-N3′-EGFR-5′S- | 5 | 0.5 | IV | 5.0 | 1 | 96 |
| | PEG5k (n = 1) | | | | | | |
| 3 | EGFR3-Ab(Cys)-N3′-EGFR-5′S- | 5 | 0.25 | IV | 5.0 | 1 | 96 |
| | PEG5k (n = 1) | | | | | | |
| 4 | EGFR-Ab(Cys)-N5′-EGFR-3′S- | 5 | 1 | IV | 5.0 | 1 | 96 |
| | PEG5k (n = 1) | | | | | | |
| 5 | EGFR-Ab(Cys)-N5′-EGFR-3′S- | 5 | 0.5 | IV | 5.0 | 1 | 96 |
| | PEG5k (n = 1) | | | | | | |
| 6 | EGFR-Ab(Cys)-N5′-EGFR-3′S- | 5 | 0.25 | IV | 5.0 | 1 | 96 |
| | PEG5k (n = 1) | | | | | | |
| 7 | EGFR-Ab(Cys)-N5′-scramble-3′S- | 5 | 1 | IV | 5.0 | 1 | 96 |
| | PEG5k (n = 1) | | | | | | |
| 8 | EGFR-Ab(Cys)-N5′-scramble-3′S- | 5 | 0.5 | IV | 5.0 | 1 | 96 |
| | PEG5k (n = 1) | | | | | | |
| 9 | EGFR-Ab(Cys)-N5′-scramble-3′S- | 5 | 0.25 | IV | 5.0 | 1 | 96 |
| | PEG5k (n = 1) | | | | | | |
| 10 | PBS Control | 5 | — | IV | 5.0 | 1 | 96 |

| | | |
|---|---|---|
| Total # of Animals: | 50 | nu/nu mice with HCC827 tumors |

[0764] siRNA concentrations were determined 96 hours in the tumor and liver after a single i.v. injection at 1.0, 0.5 and 0.25 mg/kg. Tissue concentrations were measured pmol/g and then converted to pmol/mL by assuming the density of tissue equals 1 g/mL. In FIG. 56A, a concentration of 1 nM=1 nmol/L=1 pmol/mL=1 pmol/g tissue. As illustrated in FIG. 56A, both antibody conjugates were capable of delivering higher levels of siRNA to the tumor relative to the liver, and a dose response was observed. Both conjugates were capable of EGFR gene specific mRNA knockdown at 96 hours post-administration relative to the scramble and vehicle control. See FIG. 56B.

[0765] As highlighted in FIG. 54, it was demonstrated biological activity with the A-X—B—Y—C conjugate with a range of different antibodies and siRNA cargos that are capable of in vivo biological activity in a range of different tissue targets. In this example, it was demonstrated tumor specific accumulation of 2 conjugates targeted with two different EGFR antibodies conjugated to an siRNA designed to down regulate EGFR mRNA. The HCC827 tumor expresses high levels of human EGFR and both conjugates have a human specific EGFR antibody to target the siRNA, resulting in tumor tissue specific accumulation of the conjugates. Receptor mediate uptake resulted in siRNA mediated knockdown of the target gene

### Example 16: 2016-PK-237-HCC827

siRNA Design and Synthesis

[0766] KRAS: A 21 mer duplex with 19 bases of complementarity and 3′ dinucleotide overhangs was designed against human KRAS. The sequence of the guide/antisense strand was complementary to the gene sequence starting a base position 237 for the human mRNA transcript for KRAS (UGAAUUAGCUGUAUCGUCAUU; SEQ ID NO: 2088). Base, sugar and phosphate modifications were used to optimize the potency of the duplex and reduce immunogenicity. All siRNA single strands were fully assembled on solid phase using standard phospharamidite chemistry and purified over HPLC. Purified single strands were duplexed to get the double stranded siRNA. The passenger strand contained two conjugation handles, a C6-SH at the 3′ end, which was connected to siRNA passenger strand via via phosphodiester-inverted abasic-phosphorothioate linker. The C6-SH was connected through the phosphodiester, see Example 9 for the chemical structure. In addition, the 5′ end of the passenger strand had the inverted abasic removed and the antibody was conjugated directly to the amine on passenger strand 5′ end sugar on a T base using a procedure similar to architecture 2, see Example 9.

[0767] EFGR: A 21 mer duplex with 19 bases of complementarity and 3′ dinucleotide overhangs was designed against human EGFR. The sequence of the guide/antisense strand was complementary to the gene sequence starting a base position 333 for the human mRNA transcript for EGFR (ACUCGUGCCUUGGCAAACUUU; SEQ ID NO: 2082). Base, sugar and phosphate modifications were used to optimize the potency of the duplex and reduce immunogenicity. All siRNA single strands were fully assembled on solid phase using standard phospharamidite chemistry and purified over HPLC. Purified single strands were duplexed to get the double stranded siRNA. The passenger strand contained two conjugation handles, a C6-NH₂ at the 5′ end and a C6-SH at the 3′ end. Both conjugation handles were connected to siRNA passenger strand via phosphorothioate-inverted abasic-phosphorothioate linker, see Example 9 for the chemical structure.

### ASC Synthesis and Characterization

[0768] Conjugates in groups 1-3 were made and purified as a DAR1 (n=1) using ASC architecture-7, as described in Example 9.

[0769] Conjugates in groups 4-6 were made and purified as a DAR1 (n=1) using ASC architecture-4, as described in Example 9.

### In Vivo Study Design

[0770] Groups (n=5) of female NCr nu/nu mice bearing subcutaneously (SC) flank HCC827 tumors 100-300 mm³ in volume were treated with one intravenous (i.v.) tail vein injection of siRNA conjugate, while control group 7 (n=5) of the same mice received one i.v. injection of PBS as a vehicle control. Treatment groups 1-3, 4-6 were dosed at 1.0, 0.5 or 0.25 mg/kg (based on the weight of siRNA), as per the study design below. As described in Example 9, groups 1-6 contained the same targeting antibody (EGFR) but groups 1-3 had an siRNA designed to downregulate KRAS and groups 4-6 had an siRNA designed to downregulate EGFR. All groups (treatments and controls) were administered a dose volume of 5 mL/kg. Mice were sacrificed by CO₂ asphyxiation at 96 hours post-dose. Table 28 describes the study design in more detail. 50 mg pieces of tumor and liver, were collected and snap-frozen in liquid nitrogen. mRNA knockdown in target tissue was determined using a comparative qPCR assay as described in the methods section. Total RNA was extracted from the tissue, reverse transcribed and mRNA levels were quantified using TaqMan qPCR, using the appropriately designed primers and probes. PPIB (housekeeping gene) was used as an internal RNA loading control, results were calculated by the comparative Ct method, where the difference between the target gene Ct value and the PPIB Ct value (ΔCt) is calculated and then further normalized relative to the PBS control group by taking a second difference (ΔΔCt). Quantitation of tissue siRNA concentrations were determined using a stem-loop qPCR assay as described in Example 2. The antisense strand of the siRNA was reverse transcribed using a TaqMan MicroRNA reverse transcription kit using a sequence-specific stem-loop RT primer. The cDNA from the RT step was then utilized for real-time PCR and Ct values were transformed into plasma or tissue concentrations using the linear equations derived from the standard curves. Plasma concentrations of the antibody component of the conjugate were determined using an ELISA assay.

TABLE 28

| | | | siRNA | | Dose | | Survival | Terminal | Harvest |
|---|---|---|---|---|---|---|---|---|---|
| Gro | | | Dose | | Volume | # of | Bleed | Bleed | Time |
| up | Test Article | N | (mg/kg) | ROA | (mL/kg) | Doses | (min) | (h) | (h) |
| 1 | EGFR-Ab(Cys)-KRAS- | 5 | 0.5 | IV | 5.0 | 1 | 0.25 | 72 | 72 |
| | PEG5k (n = 1) | | | | | | | | |
| 2 | EGFR-Ab(Cys)-KRAS- | 5 | 0.5 | IV | 5.0 | 1 | 3 | 96 | 96 |
| | PEG5k (n = 1) | | | | | | | | |
| 3 | EGFR-Ab(Cys)-KRAS- | 5 | 0.5 | IV | 5.0 | 1 | 24 | 168 | 168 |
| | PEG5k (n = 1) | | | | | | | | |
| 4 | EGFR-Ab(Cys)-EGFR- | 5 | 0.5 | IV | 5.0 | 1 | 0.25 | 72 | 72 |
| | PEG5k (n = 1) | | | | | | | | |
| 5 | EGFR-Ab(Cys)-EGFR- | 5 | 0.5 | IV | 5.0 | 1 | 3 | 96 | 96 |
| | PEG5k (n = 1) | | | | | | | | |
| 6 | EGFR-Ab(Cys)-EGFR- | 5 | 0.5 | IV | 5.0 | 1 | 24 | 168 | 168 |
| | PEG5k (n = 1) | | | | | | | | |
| 7 | PBS Control | 5 | — | IV | 5.0 | 1 | — | — | 96 |

| | | |
|---|---|---|
| Total # of Animals: | 35 | nu/nu mice with HCC827 tumors |

[0771] siRNA concentrations were determined 96 hours in the tumor and liver after a single i.v. injection at 1.0, 0.5 and 0.25 mg/kg. Tissue concentrations were measured pmol/g and then converted to pmol/mL by assuming the density of tissue equals 1 g/mL. In FIG. 57A and FIG. 57B, a concentration of 1 nM=1 nmol/L=1 pmol/mL=1 pmol/g tissue. As illustrated in FIG. 57A and FIG. 57B, both antibody conjugates were capable of delivering higher levels of siRNA to the tumor relative to the liver. The conjugate that contained the siRNA designed to downregulate KRAS was capable of KRAS gene specific mRNA knockdown (FIG. 57C) at 96 hours post-administration relative to the conjugate that contained the siRNA designed to down regulate EGFR or the PBS vehicle control. Both antibody conjugate constructs had similar PK properties (see FIG. 58A and FIG. 58B) indicating the alternative conjugation strategy used on the 5′ guide strand for the antibody had no impact on this biological parameter.

[0772] As highlighted in FIG. 54, it was demonstrated biological activity with the A-X—B—Y—C conjugate with a range of different antibodies and siRNA cargos that are capable of in vivo biological activity in a range of different tissue targets. In this example it was demonstrated tumor specific accumulation and siRNA mediated mRNA knockdown of a EGFR antibody conjugated to an siRNA designed to down regulate KRAS mRNA. The HCC827 tumor expresses high levels of human EGFR and the conjugate has a human specific EGFR antibody to target the siRNA, resulting in tumor tissue specific accumulation of the conjugates. Receptor mediate uptake resulted in siRNA mediated knockdown of the KRAS gene.

### Example 17: 2016-PK-187-Hep3B

siRNA Design and Synthesis

[0773] EFGR: A 21 mer duplex with 19 bases of complementarity and 3′ dinucleotide overhangs was designed against human EGFR. The sequence of the guide/antisense strand was complementary to the gene sequence starting a base position 333 for the human mRNA transcript for EGFR (ACUCGUGCCUUGGCAAACUUU; SEQ ID NO: 2082). Base, sugar and phosphate modifications were used to optimize the potency of the duplex and reduce immunogenicity. All siRNA single strands were fully assembled on solid phase using standard phospharamidite chemistry and purified over HPLC. Purified single strands were duplexed to get the double stranded siRNA. The passenger strand contained two conjugation handles, a C6-NH₂ at the 5′ end and a C6-SH at the 3′ end. Both conjugation handles were connected to siRNA passenger strand via phosphorothioate-inverted abasic-phosphorothioate linker, see Example 9 for the chemical structure.

[0774] Negative control siRNA sequence (scramble): A published (Burke et al. (2014) Pharm. Res., 31(12):3445-60) 21 mer duplex with 19 bases of complementarity and 3′ dinucleotide overhangs was used. The sequence (5′ to 3′) of the guide/antisense strand was UAUCGACGUGUCCAGCUAGUU (SEQ ID NO: 2116). Base, sugar and phosphate modifications were used to reduce immunogenicity and were comparable to those used in the active siRNA. All siRNA single strands were fully assembled on solid phase using standard phospharamidite chemistry and purified over HPLC. Purified single strands were duplexed to get the double stranded siRNA. The passenger strand contained two conjugation handles, a C6-NH₂ at the 5′ end and a C6-SH at the 3′ end. Both conjugation handles were connected to siRNA passenger strand via a phosphodiester-inverted abasic-phosphodiester linker, see Example 9 for the chemical structure.

### ASC Synthesis and Characterization

[0775] All conjugates were made and purified as a DAR1 (n=1) using ASC architecture-4, as described in Example 9.

### In Vivo Study Design

[0776] Groups (n=5) of female NCr nu/nu mice bearing subcutaneously (SC) flank Hep-3B2 1-7 tumors 100-300 mm³ in volume were treated with one intravenous (i.v.) tail vein injection of siRNA conjugate, while control group 5 (n=5) of the same mice received one i.v. injection of PBS as a vehicle control. Treatment groups 1-3 were dosed at 1.0, 0.5 or 0.25 mg/kg (based on the weight of siRNA), group 4 (scramble control) was dosed at 1.0 mg/kg, as per the study design below. Group 4 received an antibody conjugate with a negative control siRNA sequence (scramble) as a control for group 1. All groups (treatments and controls) were administered a dose volume of 5 mL/kg. Mice were sacrificed by CO₂ asphyxiation at 96 hours post-dose. Table 29 describes the study design in more detail. 50 mg pieces of tumor and liver, were collected and snap-frozen in liquid nitrogen. mRNA knockdown in target tissue was determined using a comparative qPCR assay as described in Example 2. Total RNA was extracted from the tissue, reverse transcribed and mRNA levels were quantified using TaqMan qPCR, using the appropriately designed primers and probes. PPIB (housekeeping gene) was used as an internal RNA loading control, results were calculated by the comparative Ct method, where the difference between the target gene Ct value and the PPIB Ct value (ΔCt) is calculated and then further normalized relative to the PBS control group by taking a second difference (ΔΔCt). Quantitation of tissue siRNA concentrations were determined using a stem-loop qPCR assay as described in Example 2. The antisense strand of the siRNA was reverse transcribed using a TaqMan MicroRNA reverse transcription kit using a sequence-specific stem-loop RT primer. The cDNA from the RT step was then utilized for real-time PCR and Ct values were transformed into plasma or tissue concentrations using the linear equations derived from the standard curves.

TABLE 29

| | | | siRNA | | Dose | | Har- |
|---|---|---|---|---|---|---|---|
| | | | Dose | | Volume | # | vest |
| | | | (mg/ | | (mL/ | of | Time |
| Group | Test Article | N | kg) | ROA | kg) | Doses | (h) |
| 1 | EGFR-Ab(Cys)- | 5 | 1 | IV | 5.0 | 1 | 96 |
| | EGFR-PEG5k | | | | | | |
| | (n = 1) | | | | | | |
| 2 | EGFR-Ab(Cys)- | 5 | 0.5 | IV | 5.0 | 1 | 96 |
| | EGFR-PEG5k | | | | | | |
| | (n = 1) | | | | | | |
| 3 | EGFR-Ab(Cys)- | 5 | 0.25 | IV | 5.0 | 1 | 96 |
| | EGFR-PEG5k | | | | | | |
| | (n = 1) | | | | | | |
| 4 | EGFR-Ab(Cys)- | 5 | 1 | IV | 5.0 | 1 | 96 |
| | scramble-PEG5k | | | | | | |
| | (n = 1) | | | | | | |
| 5 | PBS Control | 5 | — | IV | 5.0 | 1 | 96 |

| | | |
|---|---|---|
| Total # of Animals: | 25 | nu/nu mice with Hep3B tumors |

[0777] siRNA concentrations were determined 96 hours in the tumor and liver after a single i.v. injection at 1.0, 0.5 and 0.25 mg/kg. Tissue concentrations were measured pmol/g and then converted to pmol/mL by assuming the density of tissue equals 1 g/mL. In FIG. 59A, a concentration of 1 nM=1 nmol/L=1 pmol/mL=1 pmol/g tissue. As illustrated in FIG. 59A, the antibody conjugate was capable of delivering siRNA to the tumor. The conjugate was capable of EGFR gene specific mRNA knockdown (FIG. 59B) at 96 hours post-administration relative to the conjugate that contained the negative control siRNA sequence or the PBS vehicle control.

[0778] As highlighted in FIG. 54, it was demonstrated biological activity with the A-X—B—Y—C conjugate with a range of different antibodies and siRNA cargos that are capable of in vivo biological activity in a range of different tissue targets. In this example it was demonstrated tumor specific accumulation and siRNA mediated mRNA knockdown of an EGFR antibody conjugated to an siRNA designed to down regulate EGFR mRNA. The Hep-3B2 1-7 tumor cells express human EGFR and the conjugate has a human specific EGFR antibody to target the siRNA, resulting in tumor tissue specific accumulation of the conjugates. Receptor mediate uptake resulted in siRNA mediated knockdown of the EGFR gene.

### Example 18: 2016-PK-257-WT

siRNA Design and Synthesis

[0779] R1442: N5-CTNNB1-3'S

[0780] CTNNB1: A 21 mer duplex with 19 bases of complementarity and 3′ dinucleotide overhangs was designed against human CTNNB1. The sequence of the guide/antisense strand was complementary to the gene sequence starting a base position 1248 for the human mRNA transcript for CTNNB1 (UAAUGAGGACCUAUACUUAUU; SEQ ID NO: 2095). Base, sugar and phosphate modifications were used to optimize the potency of the duplex and reduce immunogenicity. All siRNA single strands were fully assembled on solid phase using standard phospharamidite chemistry and purified over HPLC. Purified single strands were duplexed to get the double stranded siRNA. The passenger strand contained two conjugation handles, a C6-NH₂ at the 5′ end and a C6-SH at the 3′ end. Both conjugation handles were connected to the siRNA passenger strand via phosphodiester-inverted abasic-phosphorothioate linker. The C6-NH₂ and C6-SH were connected through the phosphodiester, see Example 9 for the chemical structure.

### ASC Synthesis and Characterization

[0781] The antibody conjugate was made and purified as a DAR1 (n=1) using ASC architecture-1, as described in Example 9. The tri-GalNAc-CTNNB1 conjugate was made as described in Example 9.

### In Vivo Study Design

[0782] Groups 1-3 (n=4) of wild-type female CD-1 mice were treated with one intravenous (i.v.) tail vein injections of siRNA conjugates, the GalNAc targeted control was doses by subcutaneous injection. Treatment groups 1-3 received doses of 2.0 1.0 and 0.5 mg/kg (based on the weight of siRNA) and the GalNAc targeted control conjugate was doses at 2 mg/kg. All groups were administered a dose volume of 5.0 mL/kg. Table 30 illustrates the study design in more detail. 50 mg pieces of liver were collected and snap-frozen in liquid nitrogen. mRNA knockdown in target tissue was determined using a comparative qPCR assay as described in Example 2. Total RNA was extracted from the tissue, reverse transcribed and mRNA levels were quantified using TaqMan qPCR, using the appropriately designed primers and probes. PPIB (housekeeping gene) was used as an internal RNA loading control, results were calculated by the comparative Ct method, where the difference between the target gene Ct value and the PPIB Ct value (ΔCt) is calculated and then further normalized relative to the PBS control group by taking a second difference (ΔΔCt).

TABLE 30

| | | | siRNA | | Dose | | Harvest |
|---|---|---|---|---|---|---|---|
| | | | Dose | | Volume | # of | Time |
| Group | Test Article | N | (mg/kg) | ROA | (mL/kg) | Doses | (h) |
| 1 | ASGR1-Ab(Lys)- | 4 | 2 | IV | 5.0 | 1 | 96 |
| | CTNNB1-PEG5k | | | | | | |
| | (n = 1) | | | | | | |
| 2 | ASGR1-Ab(Lys)- | 4 | 1 | IV | 5.0 | 1 | 96 |
| | CTNNB1-PEG5k | | | | | | |
| | (n = 1) | | | | | | |
| 3 | ASGR1-Ab(Lys)- | 4 | 0.5 | IV | 5.0 | 1 | 96 |
| | CTNNB1- | | | | | | |
| | PEG5k (n = 1) | | | | | | |
| 4 | 3GalNAc-CTNNB1 | 5 | 2 | s.c. | 5.0 | 1 | 96 |
| | Control | | | | | | |
| 5 | PBS Control | 5 | — | IV | 5.0 | 1 | 96 |

| | | |
|---|---|---|
| Total # of Animals: | 22 | WT mice (CD-1) |

[0783] CTNNB1 gene knockdown was determined 96 hours post administration. As illustrated in FIG. 60, the GalNac-conjugated siRNA was capable of gene specific knockdown after a single s.c injection, as has been well described by others in the field. The same siRNA conjugated to an ASGR antibody was also capable of CTNNB1 gene specific downregulation and in a dose dependent manner.

[0784] As highlighted in FIG. 54, it was demonstrated biological activity with the A-X—B—Y—C conjugate with a range of different antibodies and siRNA cargos that are capable of in vivo biological activity in a range of different tissue targets. In this example it was demonstrated liver delivery with an ASGR antibody conjugated to an siRNA designed to down regulate CTNNB1 mRNA. Mouse Liver cells express the asialoglycoprotein receptor (ASGR) and the conjugate has a mouse specific ASGR antibody to target the siRNA, resulting in siRNA mediated knockdown of the CTNNB1 in the liver.

### Example 19: 2016-PK-253-WT

siRNA Design and Synthesis

[0785] KRAS: A 21 mer duplex with 19 bases of complementarity and 3′ dinucleotide overhangs was designed against human KRAS. The sequence of the guide/antisense strand was complementary to the gene sequence starting a base position 237 for the human mRNA transcript for KRAS (UGAAUUAGCUGUAUCGUCAUU; SEQ ID NO: 2088). Base, sugar and phosphate modifications were used to optimize the potency of the duplex and reduce immunogenicity. All siRNA single strands were fully assembled on solid phase using standard phospharamidite chemistry and purified over HPLC. Purified single strands were duplexed to get the double stranded siRNA. The passenger strand contained two conjugation handles, a C6-NH₂ at the 5′ end and a C6-SH at the 3′ end. Both conjugation handles were connected to siRNA passenger strand via phosphodiester-inverted abasic-phosphorothioate linker. The C6-NH₂ and C6-SH were connected through the phosphodiester, see Example 9 for the chemical structure.

### ASC Synthesis and Characterization

[0786] The antibody conjugate was made and purified as a DAR1 (n=1) using ASC architecture-1, as described in Example 9. The tri-GalNAc-CTNNB1 conjugate was made as described in Example 9.

### In Vivo Study Design

[0787] Groups 1-3 (n=4) of wild-type female CD-1 mice were treated with one intravenous (i.v.) tail vein injections of siRNA conjugates, the GalNAc targeted control was doses by subcutaneous injection. Treatment groups 1-3 received doses of 2.0 1.0 and 0.5 mg/kg (based on the weight of siRNA) and the GalNAc targeted control conjugate was doses at 2 mg/kg. All groups were administered a dose volume of 5.0 mL/kg. Table 31 illustrates the study design in more detail. 50 mg pieces of liver were collected and snap-frozen in liquid nitrogen. mRNA knockdown in target tissue was determined using a comparative qPCR assay as described in Example 2. Total RNA was extracted from the tissue, reverse transcribed and mRNA levels were quantified using TaqMan qPCR, using the appropriately designed primers and probes. PPIB (housekeeping gene) was used as an internal RNA loading control, results were calculated by the comparative Ct method, where the difference between the target gene Ct value and the PPIB Ct value (ΔCt) is calculated and then further normalized relative to the PBS control group by taking a second difference (ΔΔCt).

TABLE 31

| | | | siRNA | | Dose | | Harvest |
|---|---|---|---|---|---|---|---|
| | | | Dose | | Volume | # of | Time |
| Group | Test Article | N | (mg/kg) | ROA | (mL/kg) | Doses | (h) |
| 1 | ASGR1-Ab(Lys)- | 4 | 2 | IV | 5.0 | 1 | 96 |
| | KRAS-PEG5k | | | | | | |
| | (n = 1) | | | | | | |
| 2 | ASGR1-Ab(Lys)- | 4 | 1 | IV | 5.0 | 1 | 96 |
| | KRAS-PEG5k | | | | | | |
| | (n = 1) | | | | | | |
| 3 | ASGR1-Ab(Lys)- | 4 | 0.5 | IV | 5.0 | 1 | 96 |
| | KRAS-PEG5k | | | | | | |
| | (n = 1) | | | | | | |
| 4 | 3GalNAc-KRAS | 5 | 2 | s.c. | 5.0 | 1 | 96 |
| | Control | | | | | | |
| 5 | PBS Control | 5 | — | IV | 5.0 | 1 | 96 |

| | | |
|---|---|---|
| Total # of Animals: | 22 | WT mice (CD-1) |

[0788] KRAS gene knockdown was determined 96 hours post administration. As illustrated in FIG. 61, the GalNac-conjugated siRNA was capable of gene specific knockdown after a single s.c injection, as has been well described by others in the field. The same siRNA conjugated to an ASGR antibody was also capable of KRAS gene specific downregulation and in a dose dependent manner.

[0789] As highlighted in FIG. 54, it was demonstrated biological activity with the A-X—B—Y—C conjugate with a range of different antibodies and siRNA cargos that are capable of in vivo biological activity in a range of different tissue targets. In this example it was demonstrated liver delivery with an ASGR antibody conjugated to an siRNA designed to down regulate KRAS mRNA. Mouse Liver cells express the asialoglycoprotein receptor (ASGR) and the conjugate has a mouse specific ASGR antibody to target the siRNA, resulting in siRNA mediated knockdown of the KRAS in the liver

### Example 20: 2016-PK-129-WT-plasma

siRNA Design and Synthesis

[0790] KRAS: A 21 mer duplex with 19 bases of complementarity and 3′ dinucleotide overhangs was designed against human KRAS. The sequence of the guide/antisense strand was complementary to the gene sequence starting a base position 237 for the human mRNA transcript for KRAS (UGAAUUAGCUGUAUCGUCAUU; SEQ ID NO: 2088). Base, sugar and phosphate modifications were used to optimize the potency of the duplex and reduce immunogenicity. All siRNA single strands were fully assembled on solid phase using standard phospharamidite chemistry and purified over HPLC. Purified single strands were duplexed to get the double stranded siRNA. The passenger strand contained two conjugation handles, a C6-NH₂ at the 5′ end and a C6-SH at the 3′ end. Both conjugation handles were connected to siRNA passenger strand via a phosphodiester-inverted abasic-phosphodiester linker, see Example 9 for the chemical structure.

[0791] EFGR: A 21 mer duplex with 19 bases of complementarity and 3′ dinucleotide overhangs was designed against human EGFR. The sequence of the guide/antisense strand was complementary to the gene sequence starting a base position 333 for the human mRNA transcript for EGFR (ACUCGUGCCUUGGCAAACUUU; SEQ ID NO: 2082). Base, sugar and phosphate modifications were used to optimize the potency of the duplex and reduce immunogenicity. All siRNA single strands were fully assembled on solid phase using standard phospharamidite chemistry and purified over HPLC. Purified single strands were duplexed to get the double stranded siRNA. The passenger strand contained two conjugation handles, a C6-NH₂ at the 5′ end and a C6-SH at the 3′ end. Both conjugation handles were connected to siRNA passenger strand via phosphorothioate-inverted abasic-phosphorothioate linker, see Example 9 for the chemical structure.

### ASC Synthesis and Characterization

[0792] All conjugates were made and purified as a DAR1 (n=1) using ASC architecture-1, as described in Example 9.

### In Vivo Study Design

[0793] Groups (n=3) of wild-type female CD-1 mice were treated with one intravenous (i.v.) tail vein injections of siRNA conjugates. Treatment groups received 0.5 mg/kg (based on the weight of siRNA) and all groups were administered a dose volume of 5.0 mL/kg. Table 32 illustrates the study design in more detail. Non-terminal blood samples were collected at 5, 30, and 180 minutes post-dose via puncture of the retro-orbital plexus and centrifuged to generate plasma for PK analysis. Mice were sacrificed by CO₂ asphyxiation at 24, 96, or 168 h post-dose. Terminal blood samples were collected via cardiac puncture and processed to generate plasma for PK analysis. Quantitation of plasma siRNA concentrations were determined using a stem-loop qPCR assay as described in Example 2. The antisense strand of the siRNA was reverse transcribed using a TaqMan MicroRNA reverse transcription kit using a sequence-specific stem-loop RT primer. The cDNA from the RT step was then utilized for real-time PCR and Ct values were transformed into plasma or tissue concentrations using the linear equations derived from the standard curves. Plasma concentrations of antibody were determined using an ELISA assay.

TABLE 32

| | | | siRNA | | Dose | | Survival | Terminal |
|---|---|---|---|---|---|---|---|---|
| | | | Dose | | Volume | # of | Bleed | Bleed |
| Group | Test Article | N | (mg/kg) | ROA | (mL/kg) | Doses | (min) | (h) |
| 1 | EGFR2-Ab(Lys)-KRAS- | 3 | 0.5 | IV | 5.0 | 1 | 5 | 24 |
| 2 | PEG5k (N = 1) | 3 | 0.5 | IV | 5.0 | 1 | 30 | 96 |
| 3 | | 3 | 0.5 | IV | 5.0 | 1 | 180 | 168 |
| 4 | PSMA-Ab(Lys)-EGFR- | 3 | 0.5 | IV | 5.0 | 1 | 5 | 24 |
| 5 | PEG5k (N = 1) | 3 | 0.5 | IV | 5.0 | 1 | 30 | 96 |
| 6 | | 3 | 0.5 | IV | 5.0 | 1 | 180 | 168 |

| | | |
|---|---|---|
| Total # of Animals:: | 18 | WT mice (CD-1) |

[0794] In this in vivo PK experiment the plasma clearance of two different conjugates was explored. As illustrated in FIG. 62, both the mAb-siRNA conjugates had comparable plasma PK when comparing the plasma levels of the siRNA (KRAS vs EGFR) or the antibody (EGFR2 vs PSMA).

[0795] As highlighted in FIG. 54, it was demonstrated biological activity with the A-X—B—Y—C conjugate with a range of different antibodies and siRNA cargos that are capable of in vivo biological activity in a range of different tissue targets. In this example it was demonstrated that two different conjugates with different antibody targeting ligands and different siRNA cargos have comparable plasma PK properties.

### Example 21: 2016-PK-123-LNCaP

siRNA Design and Synthesis

[0796] EFGR: A 21 mer duplex with 19 bases of complementarity and 3′ dinucleotide overhangs was designed against human EGFR. The sequence of the guide/antisense strand was complementary to the gene sequence starting a base position 333 for the human mRNA transcript for EGFR (ACUCGUGCCUUGGCAAACUUU; SEQ ID NO: 2082). Base, sugar and phosphate modifications were used to optimize the potency of the duplex and reduce immunogenicity. All siRNA single strands were fully assembled on solid phase using standard phospharamidite chemistry and purified over HPLC. Purified single strands were duplexed to get the double stranded siRNA. The passenger strand contained two conjugation handles, a C6-NH₂ at the 5′ end and a C6-SH at the 3′ end. Both conjugation handles were connected to siRNA passenger strand via phosphorothioate-inverted abasic-phosphorothioate linker, see Example 9 for the chemical structure.

### ASC Synthesis and Characterization

[0797] All conjugates were made and purified as a DAR1 (n=1) or DAR2 (n=2) using ASC architecture-1, as described in Example 9.

### In Vivo Study Design

[0798] Groups (n=5) of female SCID SHO mice bearing subcutaneous flank LNCaP tumors 100-350 mm³ in volume were treated with one intravenous (i.v.) tail vein injection of siRNA conjugate, while control groups (n=5) of the same mice received one i.v. injection of PBS as a vehicle control. Treatment groups were dosed as per the study design in Table 33. All groups (treatments and controls) were administered a dose volume of 5.71 mL/kg. Mice were sacrificed by CO₂ asphyxiation at 72 hours post-dose. 50 mg pieces of tumor and liver, were collected and snap-frozen in liquid nitrogen. mRNA knockdown in target tissue was determined using a comparative qPCR assay as described in Example 2. Total RNA was extracted from the tissue, reverse transcribed and mRNA levels were quantified using TaqMan qPCR, using the appropriately designed primers and probes. PPIB (housekeeping gene) was used as an internal RNA loading control, results were calculated by the comparative Ct method, where the difference between the target gene Ct value and the PPIB Ct value (ΔCt) is calculated and then further normalized relative to the PBS control group by taking a second difference (ΔΔCt). Quantitation of tissue siRNA concentrations were determined using a stem-loop qPCR assay as described in Example 2. The antisense strand of the siRNA was reverse transcribed using a TaqMan MicroRNA reverse transcription kit using a sequence-specific stem-loop RT primer. The cDNA from the RT step was then utilized for real-time PCR and Ct values were transformed into plasma or tissue concentrations using the linear equations derived from the standard curves.

TABLE 33

| | | | siRNA | | Dose | | Harvest |
|---|---|---|---|---|---|---|---|
| | | | Dose | | Volume | # of | Time |
| Group | Test Article | N | (mg/kg) | ROA | (mL/kg) | Doses | (h) |
| 1 | PSMA-Ab(Lys)-EGFR-PEG5k | 5 | 2 | IV | 5.71 | 1 | 72 |
| 2 | (n = 1) | 5 | 1 | IV | 5.71 | 1 | 72 |
| 3 | | 5 | 0.5 | IV | 5.71 | 1 | 72 |
| 4 | PSMA-Ab(Lys)-EGFR-PEG5k | 5 | 4 | IV | 5.71 | 1 | 72 |
| 5 | (n = 2) | 5 | 2 | IV | 5.71 | 1 | 72 |
| 6 | | 5 | 1 | IV | 5.71 | 1 | 72 |
| 7 | PSMA-Ab(Lys)-Scramble-PEG5k | 5 | 2 | IV | 5.71 | 1 | 72 |
| | (n = 1) | | | | | | |
| 8 | EGFR siRNA Alone | 5 | 2 | IV | 5.71 | 1 | 72 |
| 9 | Vehicle | 5 | — | IV | 5.71 | 1 | 72 |

| | | |
|---|---|---|
| Total # of Animals:: | 45 | SCID SHO mice with LNCaP tumors |

[0799] siRNA concentrations were determined 72 hours in the tumor and liver after a single i.v. injection, see FIG. 63A. As illustrated in FIG. 63A, the antibody conjugate with a drug to antibody ratio of 1 (n=1) was capable of delivering siRNA to the tumor in a dose dependent manner, at levels greater than measured in the liver and produced EGFR gene specific mRNA knockdown relative to the scrambled and PBS controls. This is in contrast to the antibody conjugate with a drug to antibody ratio of 2 (n=2), which achieved lower concentrations of siRNA in the tumor at an equivalent dose, liver and tumor concentrations which were of the same magnitude and a lower levels of EGFR knockdown. The unconjugated siRNA had poor tumor and liver accumulation and no measurable EGFR mRNA knockdown. FIG. 63B illustrates relative percentage of EGFR mRNA in LNCaP Tumor.

[0800] As highlighted in FIG. 54, it was demonstrated biological activity with the A-X—B—Y—C conjugate with a range of different antibodies and siRNA cargos that are capable of in vivo biological activity in a range of different tissue targets. In this example it was demonstrated that the DAR1 conjugate is able to achieve greater siRNA tumor concentrations, relative to the DAR 2 and unconjugated siRNA. In addition, the DAR1 conjugate is able to achieve greater levels of siRNA mediate knockdown of EGFR, relative to the DAR 2 and unconjugated siRNA.

### Example 22: 2016-PK-258-WT

siRNA Design and Synthesis

[0801] HPRT: A 21 mer duplex with 19 bases of complementarity and 3′ dinucleotide overhangs was designed against human HPRT. The sequence of the guide/antisense strand was AUAAAAUCUACAGUCAUAGUU (SEQ ID NO: 2102) and design to be complementary to the gene sequence starting a base position 425 for the human mRNA transcript for HPRT. Base, sugar and phosphate modifications were used to optimize the potency of the duplex and reduce immunogenicity. All siRNA single strands were fully assembled on solid phase using standard phospharamidite chemistry and purified over HPLC. Purified single strands were duplexed to get the double stranded siRNA. The passenger strand contained two conjugation handles, a C6-NH₂ at the 5′ end and a C6-SH at the 3′ end. Both conjugation handles were connected to siRNA passenger strand via phosphodiester-inverted abasic-phosphorothioate linker. The C6-NH₂ and C6-SH were connected through the phosphodiester, see Example 9 for the chemical structure.

[0802] Negative control siRNA sequence (scramble): A published (Burke et al. (2014) Pharm. Res., 31(12):3445-60) 21 mer duplex with 19 bases of complementarity and 3′ dinucleotide overhangs was used. The sequence (5′ to 3′) of the guide/antisense strand was UAUCGACGUGUCCAGCUAGUU (SEQ ID NO: 2116). The same base, sugar and phosphate modifications that were used for the active EGFR siRNA duplex were used in the negative control siRNA. All siRNA single strands were fully assembled on solid phase using standard phospharamidite chemistry and purified over HPLC. Purified single strands were duplexed to get the double stranded siRNA. The passenger strand contained two conjugation handles, a C6-NH₂ at the 5′ end and a C6-SH at the 3′ end. Both conjugation handles were connected to siRNA passenger strand via a phosphodiester-inverted abasic-phosphodiester linker, see Example 9 for the chemical structure.

### ASC Synthesis and Characterization

[0803] Conjugates in groups 1-3 and 7-9 were made and purified as a DAR1 (n=1) using ASC architecture-4, as described in Example 9. Conjugates in groups 4-6 were made and purified as a DAR1 (n=1) using ASC architecture-1, as described in Example 9.

### In Vivo Study Design

[0804] Groups (n=4) of wild-type female CD-1 mice were treated with one intravenous (i.v.) tail vein injections of siRNA conjugates, while the control group (n=4) of the same mice received one i.v. injection of PBS as a vehicle control. Table 34 illustrates the study design in more detail. 50 mg pieces of tissue, were collected and snap-frozen in liquid nitrogen. mRNA knockdown in target tissue was determined using a comparative qPCR assay as described in Example 2. Total RNA was extracted from the tissue, reverse transcribed and mRNA levels were quantified using TaqMan qPCR, using the appropriately designed primers and probes. PPIB (housekeeping gene) was used as an internal RNA loading control, results were calculated by the comparative Ct method, where the difference between the target gene Ct value and the PPIB Ct value (ΔCt) is calculated and then further normalized relative to the PBS control group by taking a second difference (ΔΔCt). Quantitation of tissue siRNA concentrations were determined using a stem-loop qPCR assay as described in Example 2. The antisense strand of the siRNA was reverse transcribed using a TaqMan MicroRNA reverse transcription kit using a sequence-specific stem-loop RT primer. The cDNA from the RT step was then utilized for real-time PCR and Ct values were transformed into plasma or tissue concentrations using the linear equations derived from the standard curves.

TABLE 34

| | | | siRNA | | Dose | | Harvest |
|---|---|---|---|---|---|---|---|
| | | | Dose | | Volume | # of | Time |
| Group | Test Article | N | (mg/kg) | ROA | (mL/kg) | Doses | (h) |
| 1 | Anti-B cell Ab(Cys)-HPRT-PEG5k | 4 | 3 | IV | 5.0 | 1 | 96 |
| | (n = 1) | | | | | | |
| 2 | Anti-B cell Ab(Cys)-HPRT-PEG5k | 4 | 1 | IV | 5.0 | 1 | 96 |
| | (n = 1) | | | | | | |
| 3 | Anti-B cell Ab(Cys)-HPRT-PEG5k | 4 | 0.3 | IV | 5.0 | 1 | 96 |
| | (n = 1) | | | | | | |
| 4 | Anti-B cell Ab(Lys)-HPRT-PEG5k | 4 | 3 | IV | 5.0 | 1 | 96 |
| | (n = 1) | | | | | | |
| 5 | Anti-B cell Ab(Lys)-HPRT-PEG5k | 4 | 1 | IV | 5.0 | 1 | 96 |
| | (n = 1) | | | | | | |
| 6 | Anti-B cell Ab(Lys)-HPRT-PEG5k | 4 | 0.3 | IV | 5.0 | 1 | 96 |
| | (n = 1) | | | | | | |
| 7 | Anti-B cell Ab(Cys)-scramble-PEG5k | 4 | 3 | IV | 5.0 | 1 | 96 |
| | (n = 1) | | | | | | |
| 8 | Anti-B cell Ab(Cys)-scramble-PEG5k | 4 | 1 | IV | 5.0 | 1 | 96 |
| | (n = 1) | | | | | | |
| 9 | Anti-B cell Ab(Cys)-scramble-PEG5k | 4 | 0.3 | IV | 5.0 | 1 | 96 |
| | (n = 1) | | | | | | |
| 10 | PBS Control | 4 | — | IV | 5.0 | 1 | 96 |

| | | |
|---|---|---|
| Total # of Animals:: | 77 | WT mice (CD-1) |

[0805] As illustrated on FIG. 64A-FIG. 64C, after a single i.v. administration of an ASC dose dependent knockdown of HPRT in heart muscle, gastroc skeletal muscle and liver were measured. There was no measurable knockdown of HPRT in the lung tissue (FIG. 64D). In addition, dose dependent accumulation of the siRNA in all four tissue compartments was observed (FIG. 64E). There was no significant difference in the biological activity (KD and tissue concentration) between the lysine and cysteine conjugates.

[0806] As highlighted in FIG. 54, it was demonstrated biological activity with the A-X—B—Y—C conjugate with a range of different antibodies and siRNA cargos that are capable of in vivo biological activity in a range of different tissue targets. In this example it was demonstrated that an anti-B cell antibody can be used to target an siRNA to heart muscle, gastroc skeletal muscle and liver and achieve gene specific downregulation of the reporter gene HPRT. There was no measurable difference in the biological activity of the ASC constructs when a lysine or cysteine conjugation strategy was use to attach to the antibody.

### Example 23: 2016-PK-254-WT

siRNA Design and Synthesis

[0807] HPRT: A 21 mer duplex with 19 bases of complementarity and 3′ dinucleotide overhangs was designed against human HPRT. The sequence of the guide/antisense strand was AUAAAAUCUACAGUCAUAGUU (SEQ ID NO: 2102) and design to be complementary to the gene sequence starting a base position 425 for the human mRNA transcript for HPRT. Base, sugar and phosphate modifications that are well described in the field of RNAi were used to optimize the potency of the duplex and reduce immunogenicity. All siRNA single strands were fully assembled on solid phase using standard phospharamidite chemistry and purified over HPLC. Purified single strands were duplexed to get the double stranded siRNA. The passenger strand contained two conjugation handles, a C6-NH₂ at the 5′ end and a C6-SH at the 3′ end. Both conjugation handles were connected to siRNA passenger strand via phosphodiester-inverted abasic-phosphorothioate linker. The C6-NH₂ and C6-SH were connected through the phosphodiester, see Example 9 for the chemical structure.

[0808] Negative control siRNA sequence (scramble): A published (Burke et al. (2014) Pharm. Res., 31(12):3445-60) 21 mer duplex with 19 bases of complementarity and 3′ dinucleotide overhangs was used. The sequence (5′ to 3′) of the guide/antisense strand was UAUCGACGUGUCCAGCUAGUU (SEQ ID NO: 2116). The same base, sugar and phosphate modifications that were used for the active EGFR siRNA duplex were used in the negative control siRNA. All siRNA single strands were fully assembled on solid phase using standard phospharamidite chemistry and purified over HPLC. Purified single strands were duplexed to get the double stranded siRNA. The passenger strand contained two conjugation handles, a C6-NH₂ at the 5′ end and a C6-SH at the 3′ end. Both conjugation handles were connected to siRNA passenger strand via a phosphodiester-inverted abasic-phosphodiester linker, see Example 9 for the chemical structure.

### ASC Synthesis and Characterization

[0809] All conjugates were made and purified as a DAR1 (n=1) using ASC architecture-4, as described in Example 9.

### In Vivo Study Design

[0810] Groups (n=4) of wild-type female CD-1 mice were treated with one intravenous (i.v.) tail vein injections of siRNA conjugates, while the control group (n=5) of the same mice received one i.v. injection of PBS as a vehicle control. Table 35 illustrates the study design in more detail. 50 mg pieces of tissue, were collected and snap-frozen in liquid nitrogen. mRNA knockdown in target tissue was determined using a comparative qPCR assay as described in Example 2. Total RNA was extracted from the tissue, reverse transcribed and mRNA levels were quantified using TaqMan qPCR, using the appropriately designed primers and probes. PPIB (housekeeping gene) was used as an internal RNA loading control, results were calculated by the comparative Ct method, where the difference between the target gene Ct value and the PPIB Ct value (ΔCt) is calculated and then further normalized relative to the PBS control group by taking a second difference (ΔΔCt). Quantitation of tissue siRNA concentrations were determined using a stem-loop qPCR assay as described in Example 2. The antisense strand of the siRNA was reverse transcribed using a TaqMan MicroRNA reverse transcription kit using a sequence-specific stem-loop RT primer. The cDNA from the RT step was then utilized for real-time PCR and Ct values were transformed into plasma or tissue concentrations using the linear equations derived from the standard curves.

TABLE 35

| | | | siRNA | | Dose | | Harvest |
|---|---|---|---|---|---|---|---|
| | | | Dose | | Volume | # of | Time |
| Group | Test Article | N | (mg/kg) | ROA | (mL/kg) | Doses | (h) |
| 1 | Anti-B cell Fab(Cys)-HPRT-PEG5k | 4 | 10 | IV | 5.1 | 1 | 96 |
| | (n = 1) | | | | | | |
| 2 | Anti-B cell Fab(Cys)-HPRT-PEG5k | 4 | 3 | IV | 5.1 | 1 | 96 |
| | (n = 1) | | | | | | |
| 3 | Anti-B cell Fab(Cys)-HPRT-PEG5k | 4 | 1 | IV | 5.1 | 1 | 96 |
| | (n = 1) | | | | | | |
| 4 | Anti-B cell Fab(Cys)-scramble-PEG5k | 4 | 10 | IV | 5.1 | 1 | 96 |
| | (n = 1) | | | | | | |
| 5 | Anti-B cell Fab(Cys)-scramble-PEG5k | 4 | 3 | IV | 5.1 | 1 | 96 |
| | (n = 1) | | | | | | |
| 6 | Anti-B cell Fab(Cys)-scramble-PEG5k | 4 | 1 | IV | 5.1 | 1 | 96 |
| | (n = 1) | | | | | | |
| 7 | PBS Control | 5 | — | IV | 5.1 | 1 | 96 |

| | | |
|---|---|---|
| Total # of Animals:: | 29 | WT mice (CD-1) |

[0811] As illustrated on FIG. 65A-FIG. 65C, after a single i.v. administration of an ASC containing an anti-B cell Fab targeting ligand, dose dependent knockdown of HPRT in heart muscle, gastroc skeletal muscle and liver were measured. There was no measurable knockdown of HPRT in the lung tissue (FIG. 65D). In addition, dose dependent accumulation of the siRNA in all four tissue compartments was observed (FIG. 65E).

[0812] As highlighted in FIG. 54, biological activity was demonstrated with the A-X—B—Y—C conjugate with a range of different antibodies and siRNA cargos that are capable of in vivo biological activity in a range of different tissue targets. In this example it was demonstrated that an anti-B cell Fab is used to target an siRNA to heart muscle, gastroc skeletal muscle and liver and achieve gene specific downregulation of the reporter gene HPRT.

### Example 24: 2016-PK-245-WT

siRNA Design and Synthesis

[0813] CTNNB1: A 21 mer duplex with 19 bases of complementarity and 3′ dinucleotide overhangs was designed against human CTNNB1. The sequence of the guide/antisense strand was TUUCGAAUCAAUCCAACAGUU (SEQ ID NO: 2096), design to target the gene sequence starting a base position 1797 for the human mRNA transcript for CTNNB1. Base, sugar and phosphate modifications were used to optimize the potency of the duplex and reduce immunogenicity. All siRNA single strands were fully assembled on solid phase using standard phospharamidite chemistry and purified over HPLC. Purified single strands were duplexed to get the double stranded siRNA. The passenger strand contained two conjugation handles, a C6-NH₂ at the 5′ end and a C6-SH at the 3′ end. Both conjugation handles were connected to siRNA passenger strand via phosphodiester-inverted abasic-phosphorothioate linker. The C6-NH₂ and C6-SH were connected through the phosphodiester, see Example 9 for the chemical structure.

### ASC Synthesis and Characterization

[0814] Conjugates in groups 3-4 were made and purified as a DAR1 (n=1) using ASC architecture-4, as described in Example 9. Conjugates in groups 1-2 were made and purified as a DAR1 (n=1) using ASC architecture-1, as described in Example 9.

### In Vivo Study Design

[0815] Groups (n=4) of wild-type female CD-1 mice were treated with one intravenous (i.v.) tail vein injections of siRNA conjugates, while the control group (n=5) of the same mice received one i.v. injection of PBS as a vehicle control. Table 36 illustrates the study design in more detail. 50 mg pieces of tissue, were collected and snap-frozen in liquid nitrogen. mRNA knockdown in target tissue was determined using a comparative qPCR assay as described in Example 2. Total RNA was extracted from the tissue, reverse transcribed and mRNA levels were quantified using TaqMan qPCR, using the appropriately designed primers and probes. PPIB (housekeeping gene) was used as an internal RNA loading control, results were calculated by the comparative Ct method, where the difference between the target gene Ct value and the PPIB Ct value (ΔCt) is calculated and then further normalized relative to the PBS control group by taking a second difference (ΔΔCt). Quantitation of tissue siRNA concentrations were determined using a stem-loop qPCR assay as described in Example 2. The antisense strand of the siRNA was reverse transcribed using a TaqMan MicroRNA reverse transcription kit using a sequence-specific stem-loop RT primer. The cDNA from the RT step was then utilized for real-time PCR and Ct values were transformed into plasma or tissue concentrations using the linear equations derived from the standard curves.

TABLE 36

| | | | siRNA | | Dose | | Harvest |
|---|---|---|---|---|---|---|---|
| | | | Dose | | Volume | # of | Time |
| Group | Test Article | N | (mg/kg) | ROA | (mL/kg) | Doses | (h) |
| 1 | Anti-B cell Ab(Lys)-CTNNB1-PEG5k | 4 | 3 | IV | 5.0 | 1 | 96 |
| | (n = 1) | | | | | | |
| 2 | Anti-B cell Ab(Lys)-CTNNB1-PEG5k | 4 | 1 | IV | 5.0 | 1 | 96 |
| | (n = 1) | | | | | | |
| 3 | Anti-B cell Ab(Cys)-CTNNB1-PEG5k | 4 | 3 | IV | 5.0 | 1 | 96 |
| | (n = 1) | | | | | | |
| 4 | Anti-B cell Ab(Cys)-CTNNB1-PEG5k | 4 | 1 | IV | 5.0 | 1 | 96 |
| | (n = 1) | | | | | | |
| 5 | PBS Control | 5 | — | IV | 5.0 | 1 | 96 |

| | | |
|---|---|---|
| Total # of Animals:: | 21 | WT mice (CD-1) |

[0816] As illustrated on FIG. 66A and FIG. 66B, after a single i.v. administration of an ASC containing an anti-B cell antibody targeting ligand (anti-B cell-Ab), HPRT knockdown and dose dependent tissue siRNA accumulation in heart muscle were elicited. As illustrated on FIG. 66C and FIG. 66D, after a single i.v. administration of an ASC containing an anti-B cell antibody targeting ligand, HPRT knockdown and dose dependent tissue siRNA accumulation in gastroc skeletal muscle were elicited. There was no significant difference in the biological activity (KD and tissue concentration) between the lysine and cysteine conjugates.

[0817] As highlighted in FIG. 54, it was demonstrated biological activity with the A-X—B—Y—C conjugate with a range of different antibodies and siRNA cargos that are capable of in vivo biological activity in a range of different tissue targets. In this example, it was demonstrated that an anti-B cell antibody is used to target an siRNA to heart muscle and gastroc skeletal muscle and achieve gene specific downregulation of CTNNB1 mRNA.

### Example 25: 2016-PK-160-LNCaP

siRNA Design and Synthesis

[0818] AR: A 21 mer duplex with 19 bases of complementarity and 3′ dinucleotide overhangs was designed against human AR. The sequence of the guide/antisense strand was complementary to the gene sequence starting a base position 2822 for the human mRNA transcript for AR (Guide strand sequence: GAGAGCUCCAUAGUGACACUU; SEQ ID NO: 2108). Base, sugar and phosphate modifications were used to optimize the potency of the duplex and reduce immunogenicity. All siRNA single strands were fully assembled on solid phase using standard phospharamidite chemistry and purified over HPLC. Purified single strands were duplexed to get the double stranded siRNA. The passenger strand contained two conjugation handles, a C6-NH₂ at the 5′ end and a C6-SH at the 3′ end. Both conjugation handles were connected to siRNA passenger strand via phosphorothioate-inverted abasic-phosphorothioate linker, see Example 9 for the chemical structure.

[0819] Negative control siRNA sequence (scramble): A published (Burke et al. (2014) Pharm. Res., 31(12):3445-60) 21 mer duplex with 19 bases of complementarity and 3′ dinucleotide overhangs was used. The sequence (5′ to 3′) of the guide/antisense strand was UAUCGACGUGUCCAGCUAGUU (SEQ ID NO: 2116). Base, sugar and phosphate modifications were used to reduce immunogenicity and were comparable to those used in the active siRNA. All siRNA single strands were fully assembled on solid phase using standard phospharamidite chemistry and purified over HPLC. Purified single strands were duplexed to get the double stranded siRNA. The passenger strand contained two conjugation handles, a C6-NH₂ at the 5′ end and a C6-SH at the 3′ end. Both conjugation handles were connected to siRNA passenger strand via a phosphodiester-inverted abasic-phosphodiester linker, see Example 9 for the chemical structure.

### ASC Synthesis and Characterization

[0820] All conjugates were made and purified as a DAR1 (n=1) using ASC architecture-1, as described in Example 9.

### In Vivo Study Design

[0821] Groups (n=5) of female SCID SHO mice bearing subcutaneous flank LNCaP tumors 100-350 mm³ in volume were treated with one intravenous (i.v.) tail vein injection of siRNA conjugate, while control group (n=5) of the same mice received one i.v. injection of PBS as a vehicle control. The table below describes the study design. Mice were sacrificed by CO₂ asphyxiation at 96 hours post-dose. 50 mg pieces of tumor and liver, were collected and snap-frozen in liquid nitrogen. mRNA knockdown in target tissue was determined using a comparative qPCR assay as described in Example 2. Total RNA was extracted from the tissue, reverse transcribed and mRNA levels were quantified using TaqMan qPCR, using the appropriately designed primers and probes. PPIB (housekeeping gene) was used as an internal RNA loading control, results were calculated by the comparative Ct method, where the difference between the target gene Ct value and the PPIB Ct value (ΔCt) is calculated and then further normalized relative to the PBS control group by taking a second difference (ΔΔCt). Quantitation of tissue siRNA concentrations were determined using a stem-loop qPCR assay as described in Example 2. The antisense strand of the siRNA was reverse transcribed using a TaqMan MicroRNA reverse transcription kit using a sequence-specific stem-loop RT primer. The cDNA from the RT step was then utilized for real-time PCR and Ct values were transformed into plasma or tissue concentrations using the linear equations derived from the standard curves.

TABLE 37

| | | | siRNA | | Dose | | Harvest |
|---|---|---|---|---|---|---|---|
| | | | Dose | | Volume | # of | Time |
| Group | Test Article | N | (mg/kg) | ROA | (mL/kg) | Doses | (h) |
| 1 | ANT4044(Lys)-AR-PEG5k | 5 | 1 | IV | 5.0 | 1 | 96 |
| | (n = 1) | | | | | | |
| 2 | ANT4044(Lys)-AR-PEG5k | 5 | 0.5 | IV | 5.0 | 1 | 96 |
| | (n = 1) | | | | | | |
| 3 | ANT4044(Lys)-AR-PE5k | 5 | 0.25 | IV | 5.0 | 1 | 96 |
| | (n = 1) | | | | | | |
| 4 | ANT4044(Lys)-scramble-PEG5k | 5 | 1 | IV | 5.0 | 1 | 96 |
| | (n = 1) | | | | | | |
| 5 | PBS Control | 5 | — | IV | 5.0 | 1 | 96 |

| | | |
|---|---|---|
| Total # of Animals:: | 30 | castrated SCID SHO mice with LNCaP tumors |

[0822] As illustrated in FIG. 67A, after a single i.v. administration of an ASC containing a PSMA antibody targeting ligand and siRNA designed to downregulate AR, AR knockdown in the LNCaP tumor tissue at all the doses tested relative to the scrambled control was elicited. As illustrated FIG. 67B, there was measurable accumulation of siRNA in the tumor tissue and at levels higher than those measured in the liver tissue.

[0823] As highlighted in FIG. 54, it was demonstrated biological activity with the A-X—B—Y—C conjugate with a range of different antibodies and siRNA cargos that are capable of in vivo biological activity in a range of different tissue targets. In this example, it was demonstrated delivery to an LNCaP prostate tumor with a PSMA antibody conjugated to an siRNA designed to down regulate AR mRNA. LNCaP cells express human PSMA on cell surface, the conjugate has a human specific PSMA antibody that binds to the antigen and allows internalization of the siRNA, resulting in siRNA mediated knockdown of AR in the tumor tissue.

### Example 26: In Vitro Uptake and Knockdown in B Cells

siRNA Design and Synthesis

[0824] HPRT: A 21 mer duplex with 19 bases of complementarity and 3′ dinucleotide overhangs was designed against human HPRT. The sequence of the guide/antisense strand was AUAAAAUCUACAGUCAUAGUU (SEQ ID NO: 2102) and design to be complementary to the gene sequence starting a base position 425 for the human mRNA transcript for HPRT. Base, sugar and phosphate modifications were used to optimize the potency of the duplex and reduce immunogenicity. All siRNA single strands were fully assembled on solid phase using standard phospharamidite chemistry and purified over HPLC. Purified single strands were duplexed to get the double stranded siRNA. The passenger strand contained two conjugation handles, a C6-NH₂ at the 5′ end and a C6-SH at the 3′ end. Both conjugation handles were connected to siRNA passenger strand via phosphodiester-inverted abasic-phosphorothioate linker. The C6-NH₂ and C6-SH were connected through the phosphodiester, see Example 9 for the chemical structure.

### ASC Synthesis and Characterization

[0825] All conjugates were made and purified as a DAR1 (n=1) using ASC architecture-4, as described in Example 9.

### In Vitro Study Design

[0826] Mouse spleens were harvested and kept in PBS with 100 u/ml penicillin and streptomycin on ice. Spleens were smashed with clean glass slides, cut into small pieces, homogenized with 18G needles, and filtered (70 um nylon membrane). Dead cells were removed with the dead cell removal kit from Milteny biotec (Catalog #130-090101) according to manufacturer instruction. To isolate mouse B cells, B cell isolation kit Milteny biotec (Catalog #130-090-862) was used following manufacturer instruction. Briefly, live spleen cells were resuspended with 200 μl of MACS buffer per mouse spleen. Non-B cells were depleted with biotin-conjugated monoclonal antibodies against CD43 (Ly48), CD4, and Ter-119, coupled with anti-biotin magnetic microbeads. From one mouse spleen, 30 million live B cells can be obtained. To activate isolated mouse B cells (2×10⁶/ml in 10% FBS RPMI-1640 with 100 u/ml penicillin and streptomycin), a cocktail of 10 μg/ml LPS, 5 μg/ml anti-IgM, 1 μg/ml anti-CD40, 0.05 μg/ml IL-4, and 0.05 μg/ml INFγ was added. After four hours of activation, ASCs (1 μM to 10 nM) were added to 10⁶ cells per well in 24 (0.5 ml media) or 12 (1 ml media) well plates. After 48 hours of ASC treatments, cells were harvested and isolated RNAs were analyzed for mRNA knockdown.

TABLE 38

| Group | Test Article |
|---|---|
| 1 | Anti-B cell Ab(Cys)-HPRT-PEG5k (n = 1) |
| 2 | Anti-B cell Ab (Cys)-scramble-PEG5k (n = 1) |
| 3 | Anti-B cell Fab(Cys)-HPRT-PEG5k (n = 1) |
| 4 | Anti-B cell Fab(Cys)-scramble-PEG5k (n = 1) |
| 5 | Anti-B cell Ab |
| 6 | Vehicle Control |

[0827] In this in vitro experiment in activated primary mouse B cells, the ability of an anti-B cell antibody and Fab ASCs to deliver an siRNA design to downregulate Hypoxanthine-guanine phosphoribosyltransferase (HPRT) was measured. As illustrated in FIG. 68A, the Fab conjugate was able to downregulate HPRT relative to the vehicle or scramble controls. As illustrated in FIG. 68B, the antibody conjugate was able to downregulate HPRT relative to the antibody, vehicle, and scramble controls.

[0828] As highlighted in FIG. 54, it was demonstrated biological activity with the A-X—B—Y—C conjugate with a range of different antibodies and siRNA cargos that are capable of in vivo biological activity in a range of different tissue targets. In this example, it was demonstrated delivery to an activated mouse B cell with a mouse anti-B cell antibody or anti-B cell Fab conjugated to an siRNA designed to down regulate HPRT mRNA. Activated mouse B cells recognize and internalize the antibody-siRNA conjugate via surface receptors that recognize the anti-B cell antibody, resulting in siRNA mediated knockdown of HPRT.

### Example 27: 2016-PK-249-WT

siRNA Design and Synthesis

[0829] EFGR: A 21 mer duplex with 19 bases of complementarity and 3′ dinucleotide overhangs was designed against human EGFR. The sequence of the guide/antisense strand was complementary to the gene sequence starting a base position 333 for the human mRNA transcript for EGFR (ACUCGUGCCUUGGCAAACUUU; SEQ ID NO: 2082). Base, sugar and phosphate modifications were used to optimize the potency of the duplex and reduce immunogenicity. All siRNA single strands were fully assembled on solid phase using standard phospharamidite chemistry and purified over HPLC. Purified single strands were duplexed to get the double stranded siRNA. The passenger strand contained two conjugation handles, a C6-NH₂ at the 5′ end and a C6-SH at the 3′ end. Both conjugation handles were connected to siRNA passenger strand via phosphorothioate-inverted abasic-phosphorothioate linker, see Example 9 for the chemical structure.

[0830] KRAS: A 21 mer duplex with 19 bases of complementarity and 3′ dinucleotide overhangs was designed against human EGFR. The sequence of the guide/antisense strand was complementary to the gene sequence starting a base position 237 for the human mRNA transcript for KRAS (UGAAUUAGCUGUAUCGUCAUU; SEQ ID NO: 2088). Base, sugar and phosphate modifications were used to optimize the potency of the duplex and reduce immunogenicity. All siRNA single strands were fully assembled on solid phase using standard phospharamidite chemistry and purified over HPLC. Purified single strands were duplexed to get the double stranded siRNA. The passenger strand contained two conjugation handles, a C6-NH₂ at the 5′ end and a C6-SH at the 3′ end. Both conjugation handles were connected to siRNA passenger strand via phosphorothioate-inverted abasic-phosphorothioate linker, see Example 9 for the chemical structure.

### ASC Synthesis and Characterization

[0831] The conjugate for groups 1-2 were made and purified as a DAR1 (n=1) using ASC architecture-4, as described in Example 9. The conjugate for groups 3-4 were made and purified as a DAR2 (n=2) using ASC architecture-4, as described in Example 9. The conjugate for groups 5-6 were made and purified as a DAR1 (n=1) using ASC architecture-5, as described in Example 9. The conjugate for groups 7-8 were made and purified as a DAR2 (n=2) using ASC architecture-5, as described in Example 9. The conjugate for groups 9-10 were made and purified as a DAR1 (n=1) using ASC architecture-6, as described in Example 9. The conjugate for groups 11-12 were made and purified as a DAR2 (n=2) using ASC architecture-6, as described in Example 9.

### In Vivo Study Design

[0832] Groups (n=4) of wild-type female CD-1 mice were treated with one intravenous (i.v.) tail vein injections of siRNA conjugates (groups 1-12) or antibody alone (groups 13-14). Table 39 illustrates the study design. Non-terminal blood samples were collected at 0.25, and 3 hours post-dose via puncture of the retro-orbital plexus and centrifuged to generate plasma for PK analysis. Mice were sacrificed by CO₂ asphyxiation at 24 and 72 hours post-dose. Terminal blood samples were collected via cardiac puncture and processed to generate plasma for PK analysis. Quantitation of plasma siRNA concentrations were determined using a stem-loop qPCR assay as described in Example 2. The antisense strand of the siRNA was reverse transcribed using a TaqMan MicroRNA reverse transcription kit using a sequence-specific stem-loop RT primer. The cDNA from the RT step was then utilized for real-time PCR and Ct values were transformed into plasma or tissue concentrations using the linear equations derived from the standard curves. Plasma concentrations of antibody were determined using an ELISA assay.

TABLE 39

| | | | siRNA | Dose | | Survival | Terminal |
|---|---|---|---|---|---|---|---|
| | | | Dose | Volume | # of | Bleed | Bleed |
| Gr | Test Article | N | (mg/kg) | (mL/kg) | Doses | (h) | (h) |
| 1 | EGFR-Ab(Cys)-EGFR-PEG5k | 4 | 0.5 | 5.0 | 1 | 0.25 | 24 |
| | (n = 1) | | | | | | |
| 2 | EGFR-Ab(Cys)-EGFR-PEG5k | 4 | 0.5 | 5.0 | 1 | 3 | 72 |
| | (n = 1) | | | | | | |
| 3 | EGFR-Ab(Cys)-EGFR-PEG5k | 4 | 0.5 | 5.0 | 1 | 0.25 | 24 |
| | (n = 2) | | | | | | |
| 4 | EGFR-Ab(Cys)-EGFR-PEG5k | 4 | 0.5 | 5.0 | 1 | 3 | 72 |
| | (n = 2) | | | | | | |
| 5 | EGFR-Ab(Lys-DHPz)-KRAS-PEG5k | 4 | 0.5 | 5.0 | 1 | 0.25 | 24 |
| | (n = 1) | | | | | | |
| 6 | EGFR-Ab(Lys-DHPz)-KRAS-PEG5k | 4 | 0.5 | 5.0 | 1 | 3 | 72 |
| | (n = 1) | | | | | | |
| 7 | EGFR-Ab(Lys-DHPz)-KRAS-PEG5k | 4 | 0.5 | 5.0 | 1 | 0.25 | 24 |
| | (n = 2) | | | | | | |
| 8 | EGFR-Ab(Lys-DHPz)-KRAS-PEG5k | 4 | 0.5 | 5.0 | 1 | 3 | 72 |
| | (n = 2) | | | | | | |
| 9 | EGFR-Ab(Asn297-DHPz)-KRAS-PEG5k | 4 | 0.125 | 5.0 | 1 | 0.25 | 24 |
| | (n = 1) | | | | | | |
| 10 | EGFR-Ab(Asn297-DHPz)-KRAS-PEG5k | 4 | 0.125 | 5.0 | 1 | 3 | 72 |
| | (n = 1) | | | | | | |
| 11 | EGFR-Ab(Asn297-DHPz)-KRAS-PEG5k | 4 | 0.125 | 5.0 | 1 | 0.25 | 24 |
| | (n = 2) | | | | | | |
| 12 | EGFR-Ab(Asn297-DHPz)-KRAS-PEG5k | 4 | 0.125 | 5.0 | 1 | 3 | 72 |
| | (n = 2) | | | | | | |
| 13 | EGFR-Ab | 4 | 0.5 | 5.0 | 1 | 0.25 | 24 |
| 14 | EGFR-Ab | 4 | 0.5 | 5.0 | 1 | 3 | 72 |

| | | |
|---|---|---|
| Total # of Animals:: | 56 | WT mice CD-1 |

[0833] In this in vivo PK study it was demonstrated the utility of site specific conjugation. As illustrated in FIG. 69A, the DAR1 (n=1) test article (group 9) had a comparable siRNA plasma clearance profile to the two controls (groups 1 and 5), with approximately 10% of the siRNA remaining in the plasma after 168 hours. All the DAR2 (n=2) conjugates had much faster clearance of the siRNA from the plasma relative to the DAR1 conjugates. As illustrated in FIG. 69B, the DAR1 (n=1) test article (group 9) had a comparable EGFR-Ab plasma clearance profile to the two controls (groups 1 and 5). All the DAR2 (n=2) conjugates had much faster clearance of the antibody from the plasma relative to the DAR1 conjugates.

[0834] In the above Examples, it was demonstrated the use of lysine and cysteine conjugation strategies to attach the siRNA to the antibody. In this example, it was demonstrated the utility of a site specific conjugation strategy and demonstrate the conjugate has comparable PK properties to non-specific conjugation strategies.

### Example 28: 2016-PK-180-HCC827

siRNA Design and Synthesis

[0835] EFGR: A 21 mer duplex with 19 bases of complementarity and 3′ dinucleotide overhangs was designed against human EGFR. The sequence of the guide/antisense strand was complementary to the gene sequence starting a base position 333 for the human mRNA transcript for EGFR (ACUCGUGCCUUGGCAAACUUU; SEQ ID NO: 2082). Base, sugar and phosphate modifications were used to optimize the potency of the duplex and reduce immunogenicity. All siRNA single strands were fully assembled on solid phase using standard phospharamidite chemistry and purified over HPLC. Purified single strands were duplexed to get the double stranded siRNA. The passenger strand contained two conjugation handles, a C6-NH₂ at the 5′ end and a C6-SH at the 3′ end. Both conjugation handles were connected to siRNA passenger strand via phosphorothioate-inverted abasic-phosphorothioate linker, see Example 9 for the chemical structure.

[0836] Negative control siRNA sequence (scramble): A published (Burke et al. (2014) Pharm. Res., 31(12):3445-60) 21 mer duplex with 19 bases of complementarity and 3′ dinucleotide overhangs was used. The sequence (5′ to 3′) of the guide/antisense strand was UAUCGACGUGUCCAGCUAGUU (SEQ ID NO: 2116). Base, sugar and phosphate modifications were used to reduce immunogenicity and were comparable to those used in the active siRNA. All siRNA single strands were fully assembled on solid phase using standard phospharamidite chemistry and purified over HPLC. Purified single strands were duplexed to get the double stranded siRNA. The passenger strand contained two conjugation handles, a C6-NH₂ at the 5′ end and a C6-SH at the 3′ end. Both conjugation handles were connected to siRNA passenger strand via a phosphodiester-inverted abasic-phosphodiester linker, see Example 9 for the chemical structure.

### ASC Synthesis and Characterization

[0837] All conjugates were made and purified as a DAR1 (n=1) using ASC architecture-4, as described in Example 9.

### In Vivo Study Design

[0838] Groups (n=5) of female NCr nu/nu mice bearing subcutaneously (SC) flank HCC827 tumors 100-300 mm³ in volume were treated with one intravenous (i.v.) tail vein injection of siRNA conjugate, while control group (n=5) of the same mice received one i.v. injection of PBS as a vehicle control. Table 40 describes the study design. Mice were sacrificed by CO₂ asphyxiation at 96 hours post-dose. 50 mg pieces of tumor and liver, were collected and snap-frozen in liquid nitrogen. mRNA knockdown in target tissue was determined using a comparative qPCR assay as described in Example 2. Total RNA was extracted from the tissue, reverse transcribed and mRNA levels were quantified using TaqMan qPCR, using the appropriately designed primers and probes. PPIB (housekeeping gene) was used as an internal RNA loading control, results were calculated by the comparative Ct method, where the difference between the target gene Ct value and the PPIB Ct value (ΔCt) is calculated and then further normalized relative to the PBS control group by taking a second difference (ΔΔCt). Quantitation of plasma and tissue siRNA concentrations were determined using a stem-loop qPCR assay as described in Example 2. The antisense strand of the siRNA was reverse transcribed using a TaqMan MicroRNA reverse transcription kit using a sequence-specific stem-loop RT primer. The cDNA from the RT step was then utilized for real-time PCR and Ct values were transformed into plasma and tissue concentrations using the linear equations derived from the standard curves.

TABLE 40

| | | | siRNA | | Dose | | Harvest |
|---|---|---|---|---|---|---|---|
| | | | Dose | | Volume | # of | Time |
| Gr | Test Article | N | (mg/kg) | ROA | (mL/kg) | Doses | (h) |
| 1 | EGFR-Ab(Cys)-EGFR-PEG5k | 5 | 1 | IV | 5.0 | 1 | 96 |
| | (n = 1) | | | | | | |
| 2 | EGFR-Ab(Cys)-EGFR-PEG5k | 5 | 0.5 | IV | 5.0 | 1 | 96 |
| | (n = 1) | | | | | | |
| 3 | EGFR-Ab(Cys)-EGFR-PEG5k | 5 | 0.25 | IV | 5.0 | 1 | 96 |
| | (n = 1) | | | | | | |
| 4 | EGFR-Ab(Cys)-ECL-EGFR-PEG5k | 5 | 1 | IV | 5.0 | 1 | 96 |
| | (n = 1) | | | | | | |
| 5 | EGFR-Ab(Cys)-ECL-EGFR-PEG5k | 5 | 0.5 | IV | 5.0 | 1 | 96 |
| | (n = 1) | | | | | | |
| 6 | EGFR-Ab(Cys)-ECL-EGFR-PEG5k | 5 | 0.25 | IV | 5.0 | 1 | 96 |
| | (n = 1) | | | | | | |
| 7 | EGFR-Ab(Cys)-EGFR-SS-PEG5k | 5 | 1 | IV | 5.0 | 1 | 96 |
| | (n = 1) | | | | | | |
| 8 | EGFR-Ab(Cys)-EGFR-SS-PEG5k | 5 | 0.5 | IV | 5.0 | 1 | 96 |
| | (n = 1) | | | | | | |
| 9 | EGFR-Ab(Cys)-EGFR-SS-PEG5k | 5 | 0.25 | IV | 5.0 | 1 | 96 |
| | (n = 1) | | | | | | |
| 10 | EGFR-Ab(Cys)-ECL-EGFR-SS-PEG5k | 5 | 1 | IV | 5.0 | 1 | 96 |
| | (n = 1) | | | | | | |
| 11 | EGFR-Ab(Cys)-ECL-EGFR-SS-PEG5k | 5 | 0.5 | IV | 5.0 | 1 | 96 |
| | (n = 1) | | | | | | |
| 12 | EGFR-Ab(Cys)-ECL-EGFR-SS-PEG5k | 5 | 0.25 | IV | 5.0 | 1 | 96 |
| | (n = 1) | | | | | | |
| 15 | EGFR-Ab(Cys)-scramble-PEG5k | 5 | 1 | IV | 5.0 | 1 | 96 |
| | (n = 1) | | | | | | |
| 16 | PBS Control | 5 | — | IV | 5.0 | 1 | 96 |

| | | |
|---|---|---|
| Total # of Animals:: | 80 | nu/nu mice with HCC827 tumors |

[0839] In this in vivo PK study, replacing the SMCC linker between the antibody and siRNA with an enzymatically cleavable linker and the introduction of a cleavable disulfide linker between the siRNA and PEG, or the combination of both were tested. As illustrated in FIG. 70A, all the linker combination were capable of EGFR mRNA knockdown in the HCC827 tumor cells relative to the scrambled control. As illustrated in FIG. 701B, all the linker combinations produced comparable siRNA tissue accumulation in the tumor and liver. As illustrated in FIG. 70C, all the conjugates were capable of maintaining high levels of siRNA in the plasma, with approximately 10% remaining in the plasma after 168 hours.

[0840] In this AXBYC example, it was demonstrated that different linker combinations (“X” and/or “Y”)can be used to conjugate the siRNA to the antibody and PEG.

### Example 29: 2016-PK-162-LNCaP

[0841] EFGR: A 21 mer duplex with 19 bases of complementarity and 3′ dinucleotide overhangs was designed against human EGFR. The sequence of the guide/antisense strand was complementary to the gene sequence starting a base position 333 for the human mRNA transcript for EGFR (ACUCGUGCCUUGGCAAACUUU; SEQ ID NO: 2082). Base, sugar and phosphate modifications were used to optimize the potency of the duplex and reduce immunogenicity. All siRNA single strands were fully assembled on solid phase using standard phospharamidite chemistry and purified over HPLC. Purified single strands were duplexed to get the double stranded siRNA. The passenger strand contained two conjugation handles, a C6-NH₂ at the 5′ end and a C6-SH at the 3′ end. Both conjugation handles were connected to siRNA passenger strand via phosphorothioate-inverted abasic-phosphorothioate linker, see Example 9 for the chemical structure.

[0842] Negative control siRNA sequence (scramble): A published (Burke et al. (2014) Pharm. Res., 31(12):3445-60) 21 mer duplex with 19 bases of complementarity and 3′ dinucleotide overhangs was used. The sequence (5′ to 3′) of the guide/antisense strand was UAUCGACGUGUCCAGCUAGUU (SEQ ID NO: 2116). Base, sugar and phosphate modifications were used to reduce immunogenicity and were comparable to those used in the active siRNA. All siRNA single strands were fully assembled on solid phase using standard phospharamidite chemistry and purified over HPLC. Purified single strands were duplexed to get the double stranded siRNA. The passenger strand contained two conjugation handles, a C6-NH₂ at the 5′ end and a C6-SH at the 3′ end. Both conjugation handles were connected to siRNA passenger strand via a phosphodiester-inverted abasic-phosphodiester linker, see Example 9 for the chemical structure.

### ASC Synthesis and Characterization

[0843] All conjugates were made and purified as a DAR1 (n=1) using ASC architecture-4, as described in Example 9.

### In Vivo Study Design

[0844] Groups 1-7 (n=5) of female SCID SHO mice bearing subcutaneous flank LNCaP tumors 100-350 mm³ in volume were treated with one intravenous (i.v.) tail vein injection of siRNA conjugate, while control group 8 (n=5) of the same mice received one i.v. injection of PBS as a vehicle control. The table below describes the study design. Mice were sacrificed by CO₂ asphyxiation at 96 hours post-dose. 50 mg pieces of tumor and liver, were collected and snap-frozen in liquid nitrogen. mRNA knockdown in target tissue was determined using a comparative qPCR assay as described in Example 2. Total RNA was extracted from the tissue, reverse transcribed and mRNA levels were quantified using TaqMan qPCR, using the appropriately designed primers and probes. PPIB (housekeeping gene) was used as an internal RNA loading control, results were calculated by the comparative Ct method, where the difference between the target gene Ct value and the PPIB Ct value (ΔCt) is calculated and then further normalized relative to the PBS control group by taking a second difference (ΔΔCt). Quantitation of tissue siRNA concentrations were determined using a stem-loop qPCR assay as described in Example 2. The antisense strand of the siRNA was reverse transcribed using a TaqMan MicroRNA reverse transcription kit using a sequence-specific stem-loop RT primer. The cDNA from the RT step was then utilized for real-time PCR and Ct values were transformed into plasma or tissue concentrations using the linear equations derived from the standard curves.

TABLE 41

| | | | siRNA | | Dose | | Harvest |
|---|---|---|---|---|---|---|---|
| | | | Dose | | Volume | # of | Time |
| Group | Test Article | N | (mg/kg) | ROA | (mL/kg) | Doses | (h) |
| 1 | PSMA-Ab(Lys)-SS-EGFR-PEG5k | 5 | 1 | IV | 5.0 | 1 | 96 |
| | (n = 1) | | | | | | |
| 2 | PSMA-Ab(Lys)-SS-EGFR-PEG5k | 5 | 0.5 | IV | 5.0 | 1 | 96 |
| | (n = 1) | | | | | | |
| 3 | PSMA-Ab(Cys)-ECL-EGFR-PEG5k | 5 | 1 | IV | 5.0 | 1 | 96 |
| | (n = 1) | | | | | | |
| 4 | PSMA-Ab(Cys)-ECL-EGFR-PEG5k | 5 | 0.5 | IV | 5.0 | 1 | 96 |
| | (n = 1) | | | | | | |
| 5 | PSMA-Ab(Cys)-EGFR-PEG5k | 5 | 1 | IV | 5.0 | 1 | 96 |
| | (n = 1) FRESH | | | | | | |
| 6 | PSMA-Ab(Cys)-EGFR-PEG5k | 5 | 1 | IV | 5.0 | 1 | 96 |
| | (n = 1) FROZEN | | | | | | |
| 7 | PSMA-Ab(Cys)-svcramble-PEG5k | 5 | 1 | IV | 5.0 | 1 | 96 |
| | (n = 1) | | | | | | |
| 8 | PBS Control | 5 | — | IV | 5.0 | 1 | 96 |

| | | |
|---|---|---|
| Total # of Animals:: | 40 | SCID SHO mice with LNCaP tumors |

[0845] In this in vivo PK study, a disulfide (SS), enzymatically cleavable (ECL) or SMCC linker was used between the antibody and siRNA. As illustrated in graph 1 on slide 42, the tumor tissue accumulation of the siRNA was reduced when the cleavable disulfide leaker was used instead of the ECL or SMCC linkers. As illustrated on graph 2 on slide 42, the ECL linker strategy produced EGFR mRNA knockdown in the LNCaP tumor cells relative to the scrambled control. However, the SS linker failed to produce EGFR mRNA knockdown in the LNCaP tumor cells relative to the scrambled control. In addition to these linker experiments, the feasibility of −80° C. storage of the ASC was examined. The Formulation was snap-frozen in liquid nitrogen at 5 mg/ml antibody concentration, thawed at room temperature after 30 days storage at −80° C. and diluted to the required dosing concentration prior to administration. As illustrated on graph 3 on slide 42, the construct stored at −80° C., thawed prior to administration, retained its ability to produce EGFR mRNA knockdown in the LNCaP tumor cells relative to the scrambled control.

[0846] In this AXBYC example, it was demonstrated that an ECL linker (“X”) can be used to conjugate the antibody to the siRNA and that an ASC can be stored at −80° C. for 1 month and thawed prior to administration.

### Example 30: 2016-PK-181-HCC827

siRNA Design and Synthesis

[0847] EFGR: A 21 mer duplex with 19 bases of complementarity and 3′ dinucleotide overhangs was designed against human EGFR. The sequence of the guide/antisense strand was complementary to the gene sequence starting a base position 333 for the human mRNA transcript for EGFR (ACUCGUGCCUUGGCAAACUUU; SEQ ID NO: 2082). Base, sugar and phosphate modifications that are well described in the field of RNAi were used to optimize the potency of the duplex and reduce immunogenicity. All siRNA single strands were fully assembled on solid phase using standard phospharamidite chemistry and purified over HPLC. Purified single strands were duplexed to get the double stranded siRNA. The passenger strand contained two conjugation handles, a C6-NH₂ at the 5′ end and a C6-SH at the 3′ end. Both conjugation handles were connected to siRNA passenger strand via phosphorothioate-inverted abasic-phosphorothioate linker, see Example 9 for the chemical structure.

[0848] Negative control siRNA sequence (scramble): A published (Burke et al. (2014) Pharm. Res., 31(12):3445-60) 21 mer duplex with 19 bases of complementarity and 3′ dinucleotide overhangs was used. The sequence (5′ to 3′) of the guide/antisense strand was UAUCGACGUGUCCAGCUAGUU (SEQ ID NO: 2116). Base, sugar and phosphate modifications were used to reduce immunogenicity and were comparable to those used in the active siRNA. All siRNA single strands were fully assembled on solid phase using standard phospharamidite chemistry and purified over HPLC. Purified single strands were duplexed to get the double stranded siRNA. The passenger strand contained two conjugation handles, a C6-NH₂ at the 5′ end and a C6-SH at the 3′ end. Both conjugation handles were connected to siRNA passenger strand via a phosphodiester-inverted abasic-phosphodiester linker, see Example 9 for the chemical structure.

### ASC Synthesis and Characterization

[0849] All conjugates were made and purified as a DAR1 (n=1) using ASC architecture-4, as described in Example 9.

### In Vivo Study Design

[0850] Groups (n=5) of female NCr nu/nu mice bearing subcutaneously (SC) flank HCC827 tumors 100-300 mm³ in volume were treated with one intravenous (i.v.) tail vein injection of siRNA conjugate, while control group (n=5) of the same mice received one i.v. injection of PBS as a vehicle control. Table 42 describes the study design. Mice were sacrificed by CO₂ asphyxiation at 96 hours post-dose. 50 mg pieces of tumor and liver, were collected and snap-frozen in liquid nitrogen. mRNA knockdown in target tissue was determined using a comparative qPCR assay as described in Example 2. Total RNA was extracted from the tissue, reverse transcribed and mRNA levels were quantified using TaqMan qPCR, using the appropriately designed primers and probes. PPIB (housekeeping gene) was used as an internal RNA loading control, results were calculated by the comparative Ct method, where the difference between the target gene Ct value and the PPIB Ct value (ΔCt) is calculated and then further normalized relative to the PBS control group by taking a second difference (ΔΔCt). Quantitation of tissue siRNA concentrations were determined using a stem-loop qPCR assay as described in the methods section. The antisense strand of the siRNA was reverse transcribed using a TaqMan MicroRNA reverse transcription kit using a sequence-specific stem-loop RT primer. The cDNA from the RT step was then utilized for real-time PCR and Ct values were transformed into tissue concentrations using the linear equations derived from the standard curves.

TABLE 42

| | | | siRNA | | Dose | | Harvest |
|---|---|---|---|---|---|---|---|
| | | | Dose | | Volume | # of | Time |
| Group | Test Article | N | (mg/kg) | ROA | (mL/kg) | Doses | (h) |
| 1 | EGFR-Ab(Cys)-EGFR-PEG5k | 5 | 1 | IV | 5.0 | 1 | 96 |
| | (n = 1) | | | | | | |
| 2 | EGFR-Ab(Cys)-EGFR-PEG5k | 5 | 0.5 | IV | 5.0 | 1 | 96 |
| | (n = 1) | | | | | | |
| 3 | EGFR-Ab(Cys)-SS-EGFR-PEG5k | 5 | 1 | IV | 5.0 | 1 | 96 |
| | (n = 1) | | | | | | |
| 4 | EGFR-Ab(Cys)-SS-EGFR-PEG5k | 5 | 0.5 | IV | 5.0 | 1 | 96 |
| | (n = 1) | | | | | | |
| 6 | EGFR-Ab(Cys)-scramble-PEG5k | 5 | 1 | IV | 5.0 | 1 | 96 |
| | (n = 1) | | | | | | |
| 7 | EGFR-Ab(Cys)-scramble-PEG5k | 5 | 0.5 | IV | 5.0 | 1 | 96 |
| | (n = 1) | | | | | | |
| 8 | PBS Control | 5 | — | IV | 5.0 | 1 | 96 |

| | | |
|---|---|---|
| Total # of Animals:: | 80 | nu/nu mice with HCC827 tumors |

[0851] In this in vivo PK study, a disulfide or SMCC linker was used between the antibody and siRNA. As illustrated in FIG. 72A, the tumor tissue accumulation of the siRNA was reduced when the cleavable disulfide leaker was used instead of the more stable SMCC linker. As illustrated in FIG. 72B, both linker strategies were capable of producing EGFR mRNA knockdown in the HCC827 tumor cells relative to the scrambled control.

[0852] In this AXBYC example, it was demonstrated the use of a cleavable disulfide linker (“X”) between the antibody and siRNA.

### Example 31: 2016-PK-220-WT

siRNA Design and Synthesis

[0853] KRAS: A 21 mer duplex with 19 bases of complementarity and 3′ dinucleotide overhangs was designed against human KRAS. The sequence of the guide/antisense strand was complementary to the gene sequence starting a base position 237 for the human mRNA transcript for KRAS (Guide strand sequence: UGAAUUAGCUGUAUCGUCAUU; SEQ ID NO: 2088). Base, sugar and phosphate modifications were used to optimize the potency of the duplex and reduce immunogenicity. All siRNA single strands were fully assembled on solid phase using standard phospharamidite chemistry and purified over HPLC. Purified single strands were duplexed to get the double stranded siRNA. The passenger strand contained two conjugation handles, a C6-NH₂ at the 5′ end and a C6-SH at the 3′ end. Both conjugation handles were connected to siRNA passenger strand via phosphorothioate-inverted abasic-phosphorothioate linker, see Example 9 for the chemical structure.

### ASC Synthesis and Characterization

[0854] All conjugates were made and purified as a DAR1 (n=1) using ASC architecture-4, as described in Example 9.

### In Vivo Study Design

[0855] Groups (n=4) of wild-type female CD-1 mice were treated with one intravenous (i.v.) tail vein injections of siRNA conjugates. Treatment groups received 0.5 mg/kg (based on the weight of siRNA) and all groups were administered a dose volume of 5.0 mL/kg. Table 43 illustrates the study design in more detail. Non-terminal blood samples were collected at 5, 30, and 180 minutes post-dose via puncture of the retro-orbital plexus and centrifuged to generate plasma for PK analysis. Mice were sacrificed by CO₂ asphyxiation at 24, 96, or 168 hours post-dose. Terminal blood samples were collected via cardiac puncture and processed to generate plasma for PK analysis. Quantitation of plasma siRNA concentrations were determined using a stem-loop qPCR assay as described in Example 2. The antisense strand of the siRNA was reverse transcribed using a TaqMan MicroRNA reverse transcription kit using a sequence-specific stem-loop RT primer. The cDNA from the RT step was then utilized for real-time PCR and Ct values were transformed into plasma or tissue concentrations using the linear equations derived from the standard curves. Plasma concentrations of antibody were determined using an ELISA assay.

TABLE 43

| | | | siRNA | | Dose | | Survival | Terminal |
|---|---|---|---|---|---|---|---|---|
| | | | Dose | | Volume | # of | Bleed | Bleed |
| Group | Test Article | N | (mg/kg) | ROA | (mL/kg) | Doses | (min) | (h) |
| 1 | EGFR-Ab(Lys)-SPDP-KRAS-PEG5k | 4 | 0.5 | IV | 5.0 | 1 | 5 | 24 |
| 2 | (n = 1) | 4 | 0.5 | IV | 5.0 | 1 | 30 | 96 |
| 3 | | 4 | 0.5 | IV | 5.0 | 1 | 180 | 168 |
| 4 | EGFR-Ab(Cys)-SPDP-KRAS-PEG5k | 4 | 0.5 | IV | 5.0 | 1 | 5 | 24 |
| 5 | (n = 1) | 4 | 0.5 | IV | 5.0 | 1 | 30 | 96 |
| 6 | | 4 | 0.5 | IV | 5.0 | 1 | 180 | 168 |
| 7 | EGFR-Ab(Cys)-SMPT-KRAS-PEG5k | 4 | 0.5 | IV | 5.0 | 1 | 5 | 24 |
| 8 | (n = 1) | 4 | 0.5 | IV | 5.0 | 1 | 30 | 96 |
| 9 | | 4 | 0.5 | IV | 5.0 | 1 | 180 | 168 |
| 10 | EGFR-Ab(Cys)-SS(methyl)-KRAS-PEG5k | 4 | 0.5 | IV | 5.0 | 1 | 5 | 24 |
| 11 | (n = 1) | 4 | 0.5 | IV | 5.0 | 1 | 30 | 96 |
| 12 | | 4 | 0.5 | IV | 5.0 | 1 | 180 | 168 |
| 13 | EGFR-Ab(Cys)-SS(dimethyl)-KRAS-PEG5k | 4 | 0.5 | IV | 5.0 | 1 | 5 | 24 |
| 14 | (n = 1) | 4 | 0.5 | IV | 5.0 | 1 | 30 | 96 |
| 15 | | 4 | 0.5 | IV | 5.0 | 1 | 180 | 168 |

| | | |
|---|---|---|
| Total # of Animals:: | 60 | WT mice CD-1 |

[0856] In this in vivo PK study, different disulfide linkers were explored, with varying degrees of steric hindrance, to understand how the rate of disulfide cleavage impacts ASC plasma PK. As illustrated in FIG. 73A, the clearance of the siRNA from the plasma was modulated by varying the degree of steric hindrance of the disulfide linker. FIG. 73B illustrates the clearance of the antibody zalutumumab from the plasma.

[0857] In this example, it was demonstrated biological activity with a range of different AXBYC conjugates in which a range of different disulfide linkers (“X”) can be used to conjugate the siRNA to the antibody.

### Example 32: 2016-PK-256-WT

siRNA Design and Synthesis

[0858] KRAS: A 21 mer duplex with 19 bases of complementarity and 3′ dinucleotide overhangs was designed against human KRAS. The sequence of the guide/antisense strand was complementary to the gene sequence starting a base position 237 for the human mRNA transcript for KRAS (Guide strand sequence: UGAAUUAGCUGUAUCGUCAUU; SEQ ID NO: 2088). Base, sugar and phosphate modifications were used to optimize the potency of the duplex and reduce immunogenicity. All siRNA single strands were fully assembled on solid phase using standard phospharamidite chemistry and purified over HPLC. Purified single strands were duplexed to get the double stranded siRNA. The passenger strand contained two conjugation handles, a C6-NH₂ at the 5′ end and a C6-SH at the 3′ end. Both conjugation handles were connected to siRNA passenger strand via phosphorothioate-inverted abasic-phosphorothioate linker, see Example 9 for the chemical structure.

### ASC Synthesis and Characterization

[0859] All conjugates were made and purified as a DAR1 (n=1) using ASC architecture-4, as described in Example 9.

### In Vivo Study Design

[0860] Groups (n=4) of wild-type female CD-1 mice were treated with one intravenous (i.v.) tail vein injections of siRNA conjugates. Treatment groups received 0.5 mg/kg (based on the weight of siRNA) and all groups were administered a dose volume of 5.0 mL/kg. Table 44 illustrates the study design in more detail. Non-terminal blood samples were collected at 0.25, 3, and 24 hours post-dose via puncture of the retro-orbital plexus and centrifuged to generate plasma for PK analysis. Mice were sacrificed by CO₂ asphyxiation at 72, 96, or 168 h post-dose. Terminal blood samples were collected via cardiac puncture and processed to generate plasma for PK analysis. Quantitation of plasma siRNA concentrations were determined using a stem-loop qPCR assay as described in Example 2. The antisense strand of the siRNA was reverse transcribed using a TaqMan MicroRNA reverse transcription kit using a sequence-specific stem-loop RT primer. The cDNA from the RT step was then utilized for real-time PCR and Ct values were transformed into plasma or tissue concentrations using the linear equations derived from the standard curves. Plasma concentrations of antibody were determined using an ELISA assay.

TABLE 44

| | | | siRNA | | Dose | | Survival | Terminal |
|---|---|---|---|---|---|---|---|---|
| | | | Dose | | Volume | # of | Bleed | Bleed |
| Group | Test Article | N | (mg/kg) | ROA | (mL/kg) | Doses | (h) | (h) |
| 1 | EGFR-Ab(Cys)-SMCC-KRAS-PEG5k (n = 1) | 4 | 0.5 | IV | 5.0 | 1 | 0.25 | 72 |
| 2 | EGFR-Ab(Cys)-SMCC-KRAS-PEG5k (n = 1) | 4 | 0.5 | IV | 5.0 | 1 | 3 | 96 |
| 3 | EGFR-Ab(Cys)-SMCC-KRAS-PEG5k (n = 1) | 4 | 0.5 | IV | 5.0 | 1 | 24 | 168 |
| 4 | EGFR-Ab(Cys)-CBTF-KRAS-PEG5k (n = 1) | 4 | 0.5 | IV | 5.0 | 1 | 0.25 | 72 |
| 5 | EGFR-Ab(Cys)-CBTF-KRAS-PEG5k (n = 1) | 4 | 0.5 | IV | 5.0 | 1 | 3 | 96 |
| 6 | EGFR-Ab(Cys)-CBTF-KRAS-PEG5k (n = 1) | 4 | 0.5 | IV | 5.0 | 1 | 24 | 168 |
| 7 | EGFR-Ab(Cys)-MBS-KRAS-PEG5k (n = 1) | 4 | 0.5 | IV | 5.0 | 1 | 0.25 | 72 |
| 8 | EGFR-Ab(Cys)-MBS-KRAS-PEG5k (n = 1) | 4 | 0.5 | IV | 5.0 | 1 | 3 | 96 |
| 9 | EGFR-Ab(Cys)-MBS-KRAS-PEG5k (n = 1) | 4 | 0.5 | IV | 5.0 | 1 | 24 | 168 |

| | | |
|---|---|---|
| Total # of Animals: | 60 | WT mice CD-1 |

[0861] In this in vivo PK study a range of different linkers between the antibody and siRNA were tested to determine the effect on plasma clearance. As illustrated on the graph on slide 45, all the conjugates were capable of maintaining high levels of siRNA in the plasma, with greater than 10% remaining in the plasma after 168 hours.

[0862] In this example, it was demonstrated biological activity with a range of different AXBYC conjugates in which a range of different linkers (“Y”) can be used to conjugate the siRNA to the antibody while maintaining the improved plasma kinetics over those historically observed for unconjugated siRNA.

### Example 33: 2016-PK-237-HCC827

siRNA Design and Synthesis

[0863] EFGR: A 21 mer duplex with 19 bases of complementarity and 3′ dinucleotide overhangs was designed against human EGFR. The sequence of the guide/antisense strand was complementary to the gene sequence starting a base position 333 for the human mRNA transcript for EGFR (Guide strad sequence: ACUCGUGCCUUGGCAAACUUU; SEQ ID NO: 2082). Base, sugar and phosphate modifications were used to optimize the potency of the duplex and reduce immunogenicity. All siRNA single strands were fully assembled on solid phase using standard phospharamidite chemistry and purified over HPLC. Purified single strands were duplexed to get the double stranded siRNA.

[0864] Two different passenger strands were made containing two conjugation handles (C6-NH₂ and C6-SH) in two different orientations (S5′-EGFR-3′N and N5′-EGFR-3'S). In the N5′-EGFR-3'S passenger strand both conjugation handles were connected to siRNA passenger strand via phosphorothioate-inverted abasic-phosphorothioate linker, see Example 9 for the chemical structure. In the S5′-EGFR-3′N passenger strand both conjugation handles were connected to siRNA passenger strand via phosphodiester-inverted abasic-phosphorothioate linker. The C6-NH₂ and C6-SH were connected through the phosphodiester, see Example 9 for the chemical structure.

### ASC Synthesis and Characterization

[0865] The conjugate for groups 1-3 was made and purified as a DAR1 (n=1) using ASC architecture-4, as described in Example 9. The conjugate for groups 4-6 was made and purified as a DAR1 (n=1) using ASC architecture-2, as described in Example 9.

### In Vivo Study Design

[0866] Groups (n=5) of female NCr flu/flu mice bearing subcutaneously (SC) flank HCC827 tumors 100-300 mm³ in volume were treated with one intravenous (i.v.) tail vein injection of siRNA conjugate, while control group (n=5) of the same mice received one i.v. injection of PBS as a vehicle control. Table 45 describes the study design. Mice were sacrificed by CO₂ asphyxiation at 72, 96, and 168 hours post-dose. 50 mg pieces of tumor and liver, were collected and snap-frozen in liquid nitrogen. mRNA knockdown in target tissue was determined using a comparative qPCR assay as described in Example 2. Total RNA was extracted from the tissue, reverse transcribed and mRNA levels were quantified using TaqMan qPCR, using the appropriately designed primers and probes. PPIB (housekeeping gene) was used as an internal RNA loading control, results were calculated by the comparative Ct method, where the difference between the target gene Ct value and the PPIB Ct value (ΔCt) is calculated and then further normialized relative to the PBS control group by taking a second difference (ΔΔCt). Quantitation of tissue and plasma siRNA concentrations were determined using a stem-loop qPCR assay as described in Example 2. The antisense strand of the siRNA was reverse transcribed using a TaqMan MicroRNA reverse transcription kit using a sequence-specific stem-loop RT primer. The cDNA from the RT step was then utilized for real-time PCR and Ct values were transformed into plasma or tissue concentrations using the linear equations derived from the standard curves.

TABLE 45

| | | | siRNA | | Dose | | Survival | Terminal | Harvest |
|---|---|---|---|---|---|---|---|---|---|
| | | | Dose | | Volume | # of | Bleed | Bleed | Time |
| Gr | Test Article | N | (mg/kg) | ROA | (mL/kg) | Doses | (min) | (h) | (h) |
| 1 | EGFR-Ab(Cys)-S5′-EGFR-3′N-PEG5k | 5 | 0.5 | IV | 5.0 | 1 | 0.25 | 72 | 72 |
| | (n = 1) | | | | | | | | |
| 2 | EGFR-Ab(Cys)-S5′-EGFR-3′N-PEG5k | 5 | 0.5 | IV | 5.0 | 1 | 3 | 96 | 96 |
| | (n = 1) | | | | | | | | |
| 3 | EGFR-Ab(Cys)-S5′-EGFR-3′N-PEG5k | 5 | 0.5 | IV | 5.0 | 1 | 24 | 168 | 168 |
| | (n = 1) | | | | | | | | |
| 4 | EGFR-Ab(Cys)-N5′-EGFR-3′S-PEG5k | 5 | 0.5 | IV | 5.0 | 1 | 0.25 | 72 | 72 |
| | (n = 1) | | | | | | | | |
| 5 | EGFR-Ab(Cys)-N5′-EGFR-3′S-PEG5k | 5 | 0.5 | IV | 5.0 | 1 | 3 | 96 | 96 |
| | (n = 1) | | | | | | | | |
| 6 | EGFR-Ab(Cys)-N5′-EGFR-3′S-PEG5k | 5 | 0.5 | IV | 5.0 | 1 | 24 | 168 | 168 |
| | (n = 1) | | | | | | | | |
| 7 | PBS Control | 5 | — | IV | 5.0 | 1 | — | — | 96 |

| | | |
|---|---|---|
| Total # of Animals: | 65 | nu/nu mice with HCC827 tumors |

[0867] In this in vivo PK study the biological outcome of changes in the orientation of the conjugation site of the antibody and PEG (5′ or 3′) onto the siRNA were evaluated. In addition, the biological outcome of using a lysine or cysteine to attach the linker to the antibody was evaluated As illustrated FIG. 75A, both orientations of siRNA produced comparable EGFR tumor knockdown. As illustrated FIG. 75B and FIG. 75C, both orientations produced comparable siRNA tissue accumulation in the tumor and liver. As illustrated in FIG. 75D, both orientations produce a comparable plasma clearance kinetics.

[0868] As highlighted in FIG. 54, it was demonstrated biological activity with the A-X—B—Y—C conjugate with a range of different antibodies and siRNA cargos that are capable of in vivo biological activity in a range of different tissue targets. In this example, it was demonstrated that the antibody can be conjugated onto the 5′ and 3′ ends of the passenger strand of the siRNA and while maintaining the biological activity of the EGFR siRNA and tissue distribution.

### Example 34: 2016-PK-259-WT

siRNA Design and Synthesis

[0869] HPRT: A 21 mer duplex with 19 bases of complementarity and 3′ dinucleotide overhangs was designed against human HPRT. The sequence of the guide/antisense strand was complementary to the gene sequence starting a base position 425 for the human mRNA transcript for HPRT (guide strand sequence: UUAAAAUCUACAGUCAUAGUU; SEQ ID NO: 2104). Base, sugar and phosphate modifications were used to optimize the potency of the duplex and reduce immunogenicity. All siRNA single strands were fully assembled on solid phase using standard phospharamidite chemistry and purified over HPLC. Purified single strands were duplexed to get the double stranded siRNA. Two different passenger strands were made containing two conjugation handles (C6-NH₂ and C6-SH) in two different orientations (S5′-HPRT-3′N and N5′-HPRT-3'S). Both conjugation handles were connected to siRNA passenger strand via phosphodiester-inverted abasic-phosphorothioate linker. The C6-NH₂ and C6-SH were connected through the phosphodiester, see Example 9 for the chemical structure.

### ASC Synthesis and Characterization

[0870] The conjugate for groups 1-3 was made and purified as a DAR1 (n=1) using ASC architecture-4, as described in Example 9. The conjugate for groups 4-6 was made and purified as a DAR1 (n=1) using ASC architecture-2, as described in Example 9. The conjugate for groups 7-9 was made and purified as a DAR1 (n=1) using ASC architecture-1, as described in Example 9. The conjugate for groups 10-12 was made and purified as a DAR1 (n=1) using ASC architecture-3, as described in Example 9.

### In Vivo Study Design

[0871] Groups (n=4) of wild-type female CD-1 mice were treated with one intravenous (i.v.) tail vein injections of siRNA conjugates, while the control group (n=5) of the same mice received one i.v. injection of PBS as a vehicle control. Table 46 illustrates the study design in more detail. 50 mg pieces of tissue, were collected and snap-frozen in liquid nitrogen. mRNA knockdown in target tissue was determined using a comparative qPCR assay as described in Example 2. Total RNA was extracted from the tissue, reverse transcribed and mRNA levels were quantified using TaqMan qPCR, using the appropriately designed primers and probes. PPIB (housekeeping gene) was used as an internal RNA loading control, results were calculated by the comparative Ct method, where the difference between the target gene Ct value and the PPIB Ct value (ΔCt) is calculated and then further normalized relative to the PBS control group by taking a second difference (ΔΔCt). Quantitation of tissue siRNA concentrations were determined using a stem-loop qPCR assay as described in Example 2. The antisense strand of the siRNA was reverse transcribed using a TaqMan MicroRNA reverse transcription kit using a sequence-specific stem-loop RT primer. The cDNA from the RT step was then utilized for real-time PCR and Ct values were transformed into plasma or tissue concentrations using the linear equations derived from the standard curves.

TABLE 46

| | | | siRNA | | Dose | | Harvest |
|---|---|---|---|---|---|---|---|
| | | | Dose | | Volume | # of | Time |
| Group | Test Article | N | (mg/kg) | ROA | (mL/kg) | Doses | (h) |
| 1 | Anti-B cell Ab(Cys)-N5′-HPRT-3′S-PEG5k | 4 | 3 | IV | 5.0 | 1 | 96 |
| | (n = 1) | | | | | | |
| 2 | Anti-B cell Ab(Cys)-N5′-HPRT-3′S-PEG5k | 4 | 1 | IV | 5.0 | 1 | 96 |
| | (n = 1) | | | | | | |
| 3 | Anti-B cell Ab(Cys)-N5′-HPRT-3′S-PEG5k | 4 | 0.3 | IV | 5.0 | 1 | 96 |
| | (n = 1) | | | | | | |
| 4 | Anti-B cell Ab(Cys)-N3′-HPRT-5′S-PEG5k | 4 | 3 | IV | 5.0 | 1 | 96 |
| | (n = 1) | | | | | | |
| 5 | Anti-B cell Ab(Cys)-N3′-HPRT-5′S-PEG5k | 4 | 1 | IV | 5.0 | 1 | 96 |
| | (n = 1) | | | | | | |
| 6 | Anti-B cell Ab(Cys)-N3′-HPRT-5′S-PEG5k | 4 | 0.3 | IV | 5.0 | 1 | 96 |
| | (n = 1) | | | | | | |
| 7 | Anti-B cell Ab(Lys)-S3′-HPRT-5′N-PEG5k | 4 | 2 | IV | 5.0 | 1 | 96 |
| | (n = 1) | | | | | | |
| 8 | Anti-B cell Ab(Lys)-S3′-HPRT-5′N-PEG5k | 4 | 0.75 | IV | 5.0 | 1 | 96 |
| | (n = 1) | | | | | | |
| 9 | Anti-B cell Ab(Lys)-S3′-HPRT-5′N-PEG5k | 4 | 0.25 | IV | 5.0 | 1 | 96 |
| | (n = 1) | | | | | | |
| 10 | Anti-B cell Ab(Lys)-S5′-HPRT-3′N-PEG5k | 4 | 2 | IV | 5.0 | 1 | 96 |
| | (n = 1) | | | | | | |
| 11 | Anti-B cell Ab(Lys)-S5′-HPRT-3′N-PEG5k | 4 | 0.75 | IV | 5.0 | 1 | 96 |
| | (n = 1) | | | | | | |
| 12 | Anti-B cell Ab(Lys)-S5′-HPRT-3′N-PEG5k | 4 | 0.25 | IV | 5.0 | 1 | 96 |
| | (n = 1) | | | | | | |
| 13 | PBS Control | 5 | — | IV | 5.0 | 1 | 96 |

| | | |
|---|---|---|
| Total # of Animals: | 53 | WT mice (CD-1) |

[0872] In the in vivo PK study the biological outcome of changes in the orientation of the conjugation site of the antibody and PEG (5′ or 3′) onto the siRNA were evaluated. In addition, the biological outcome of using a lysine or cysteine to attach the linker to the antibody was evaluated. As illustrated in FIG. 76A-FIG. 76D, all the combinations of making the antibody conjugates produced comparable HPRT knockdown in the four tissue compartments measured. As illustrated in FIG. 77A-FIG. 77D, all the combinations of making the antibody conjugates produced comparable siRNA tissue accumulation in the different compartments measured.

[0873] In this example, it was demonstrated that a variety of different conjugation strategies to the siRNA and antibody can be used in the A-X—B—Y—C format while maintaining the biological activity of the HPRT siRNA and tissue distribution.

### Example 35: 2016-PK-267-WT

siRNA Design and Synthesis

[0874] CTNNB1: A 21 mer duplex with 19 bases of complementarity and 3′ dinucleotide overhangs was designed against human CTNNB1. The sequence of the guide/antisense strand was complementary to the gene sequence starting a base position 1797 for the human mRNA transcript for CTNNB1 (guide strand sequence: UUUCGAAUCAAUCCAACAGUU; SEQ ID NO: 2098). Base, sugar and phosphate modifications were used to optimize the potency of the duplex and reduce immunogenicity. All siRNA single strands were fully assembled on solid phase using standard phospharamidite chemistry and purified over HPLC. Purified single strands were duplexed to get the double stranded siRNA.

[0875] Two different passenger strands were made containing two conjugation handles (C6-NH₂ and C6-SH) in two different orientations (S5′-CTNNB1-3′N and N5′-CTNNB1-3'S). Both conjugation handles were connected to siRNA passenger strand via phosphodiester-inverted abasic-phosphorothioate linker. The C6-NH₂ and C6-SH were connected through the phosphodiester, see Example 9 for the chemical structure.

### ASC Synthesis and Characterization

[0876] The conjugate for groups 1-3 was made and purified as a DAR1 (n=1) using ASC architecture-4, as described in Example 9. The conjugate for groups 4-6 was made and purified as a DAR1 (n=1) using ASC architecture-3, as described in Example 9. The conjugate for groups 7-9 was made and purified as a DAR1 (n=1) using ASC architecture-2, as described in Example 9. The conjugate for groups 10-12 was made and purified as a DAR1 (n=1) using ASC architecture-1, as described in Example 9.

### In Vivo Study Design

[0877] Groups (n=4) of wild-type female CD-1 mice were treated with one intravenous (i.v.) tail vein injections of siRNA conjugates, while the control group (n=5) of the same mice received one i.v. injection of PBS as a vehicle control. Table 47 illustrates the study design in more detail. 50 mg pieces of tissue, were collected and snap-frozen in liquid nitrogen. mRNA knockdown in target tissue was determined using a comparative qPCR assay as described in Example 2. Total RNA was extracted from the tissue, reverse transcribed and mRNA levels were quantified using TaqMan qPCR, using the appropriately designed primers and probes. PPIB (housekeeping gene) was used as an internal RNA loading control, results were calculated by the comparative Ct method, where the difference between the target gene Ct value and the PPIB Ct value (ΔCt) is calculated and then further normalized relative to the PBS control group by taking a second difference (ΔΔCt).

TABLE 47

| | | | siRNA | | Dose | | Harvest |
|---|---|---|---|---|---|---|---|
| | | | Dose | | Volume | # of | Time |
| Group | Test Article | N | (mg/kg) | ROA | (mL/kg) | Doses | (h) |
| 1 | Anti-B cell Ab(Cys)-N5′-CTNNB1-3′S-PEG5k | 4 | 3 | IV | 5.0 | 1 | 96 |
| | (n = 1) | | | | | | |
| 2 | Anti-B cell Ab(Cys)-N5′-CTNNB1-3′S-PEG5k | 4 | 1 | IV | 5.0 | 1 | 96 |
| | (n = 1) | | | | | | |
| 3 | Anti-B cell Ab(Cys)-N5′-CTNNB1-3′S-PEG5k | 4 | 0.3 | IV | 5.0 | 1 | 96 |
| | (n = 1) | | | | | | |
| 4 | Anti-B cell Ab(Lys)-S5′-CTNNB1-3′N-PEG5k | 4 | 3 | IV | 5.0 | 1 | 96 |
| | (n = 1) | | | | | | |
| 5 | Anti-B cell Ab(Lys)-S5′-CTNNB1-3′N-PEG5k | 4 | 1 | IV | 5.0 | 1 | 96 |
| | (n = 1) | | | | | | |
| 6 | Anti-B cell Ab(Lys)-S5′-CTNNB1-3′N-PEG5k | 4 | 0.3 | IV | 5.0 | 1 | 96 |
| | (n = 1) | | | | | | |
| 7 | Anti-B cell Ab(Cys)-N3′-CTNNB1-5′S-PEG5k | 4 | 3 | IV | 5.0 | 1 | 96 |
| | (n = 1) | | | | | | |
| 8 | Anti-B cell Ab(Cys)-N3′-CTNNB1-5′S-PEG5k | 4 | 1 | IV | 5.0 | 1 | 96 |
| | (n = 1) | | | | | | |
| 9 | Anti-B cell Ab(Cys)-N3′-CTNNB1-5′S-PEG5k | 4 | 0.3 | IV | 5.0 | 1 | 96 |
| | (n = 1) | | | | | | |
| 10 | Anti-B cell Ab(Lys)-S3′-CTNNB1-5′N-PEG5k | 4 | 3 | IV | 5.0 | 1 | 96 |
| | (n = 1) | | | | | | |
| 11 | Anti-B cell Ab(Lys)-S3′-CTNNB1-5′N-PEG5k | 4 | 1 | IV | 5.0 | 1 | 96 |
| | (n = 1) | | | | | | |
| 12 | Anti-B cell Ab(Lys)-S3′-CTNNB1-5′N-PEG5k | 4 | 0.3 | IV | 5.0 | 1 | 96 |
| | (n = 1) | | | | | | |
| 13 | PBS Control | 5 | — | IV | 5.0 | 1 | 96 |

| | | |
|---|---|---|
| Total # of Animals: | 53 | WT mice (CD-1) |

[0878] In this in vivo PK study, the biological outcome of changes in the orientation of the conjugation site of the antibody and PEG (5′ or 3′) onto the siRNA and the biological outcome of using a lysine or cysteine to attach the linker to the antibody were evaluated. As illustrated in FIG. 78A-FIG. 78D, all the combinations of making the antibody conjugates produced comparable CTNNB1 knockdown in the four tissue compartments measured.

[0879] In this example, it was demonstrated that a variety of different conjugation strategies to the siRNA and antibody can be used in the A-X—B—Y—C format while maintaining the biological activity of the CTNNB1 siRNA.

### Example 36: 2016-PK-188-PK

[0880] EFGR: A 21 mer duplex with 19 bases of complementarity and 3′ dinucleotide overhangs was designed against human EGFR. The sequence of the guide/antisense strand was complementary to the gene sequence starting a base position 333 for the human mRNA transcript for EGFR (ACUCGUGCCUUGGCAAACUUU; SEQ ID NO: 2082). Base, sugar and phosphate modifications were used to optimize the potency of the duplex and reduce immunogenicity. All siRNA single strands were fully assembled on solid phase using standard phospharamidite chemistry and purified over HPLC. Purified single strands were duplexed to get the double stranded siRNA. The passenger strand contained two conjugation handles, a C6-NH₂ at the 5′ end and a C6-SH at the 3′ end. Both conjugation handles were connected to siRNA passenger strand via phosphorothioate-inverted abasic-phosphorothioate linker, see Example 9 for the chemical structure.

### ASC Synthesis and Characterization

[0881] All conjugates were made and purified as a DAR1 (n=1) using ASC architecture-4, as described in Example 9.

### In Vivo Study Design

[0882] Groups (n=4) of wild-type female CD-1 mice were treated with one intravenous (i.v.) tail vein injections of siRNA conjugates. Treatment groups received 0.5 mg/kg (based on the weight of siRNA) and all groups were administered a dose volume of 5.0 mL/kg. Table 48 illustrates the study design in more detail. Non-terminal blood samples were collected at 5, 30, and 180 minutes post-dose via puncture of the retro-orbital plexus and centrifuged to generate plasma for PK analysis. Mice were sacrificed by CO₂ asphyxiation at 24, 96, or 168 h post-dose. Terminal blood samples were collected via cardiac puncture and processed to generate plasma for PK analysis. Quantitation of plasma siRNA concentrations were determined using a stem-loop qPCR assay as described in Example 2. The antisense strand of the siRNA was reverse transcribed using a TaqMan MicroRNA reverse transcription kit using a sequence-specific stem-loop RT primer. The cDNA from the RT step was then utilized for real-time PCR and Ct values were transformed into plasma or tissue concentrations using the linear equations derived from the standard curves.

TABLE 48

| | | | | Dose | | Survival | Terminal |
|---|---|---|---|---|---|---|---|
| | | | | Volume | # of | Bleed | Bleed |
| Gr | Test Article | N | ROA | (mL/kg) | Doses | (min) | (h) |
| 1 | EGFR-Ab(Cys)-EGFR-PEG5k | 4 | IV | 5.0 | 1 | 5 | 24 |
| 2 | (n = 1) | 4 | IV | 5.0 | 1 | 30 | 96 |
| 3 | | 4 | IV | 5.0 | 1 | 180 | 168 |
| 4 | EGFR-Ab(Cys)-ECL-EGFR-PEG5k | 4 | IV | 5.0 | 1 | 5 | 24 |
| 5 | (n = 1) | 4 | IV | 5.0 | 1 | 30 | 96 |
| 6 | | 4 | IV | 5.0 | 1 | 180 | 168 |
| 7 | EGFR-Ab(Cys)-EGFR-SS-PEG5k | 4 | IV | 5.0 | 1 | 5 | 24 |
| 8 | (n = 1) | 4 | IV | 5.0 | 1 | 30 | 96 |
| 9 | | 4 | IV | 5.0 | 1 | 180 | 168 |
| 10 | EGFR-Ab(Cys)-ECL-EGFR-SS-PEG5k | 4 | IV | 5.0 | 1 | 5 | 24 |
| 11 | (n = 1) | 4 | IV | 5.0 | 1 | 30 | 96 |
| 12 | | 4 | IV | 5.0 | 1 | 180 | 168 |

| | | |
|---|---|---|
| Total # of Animals: | 48 | WT mice CD-1 |

[0883] As illustrated in FIG. 79, all the ASC with the different cleavable linker configurations achieved equivalent plasma PK profiles, with approximately 10% of the siRNA remaining 168 hours after administration.

[0884] In this example, it was demonstrated biological activity with a range of A-X—B—Y—C conjugates in which a variety of different linker strategies (component X and Y) were used to conjugate the PEG and antibody to the siRNA passenger strand.

### Example 37: 2016-PK-201-LNCaP

siRNA Design and Synthesis

[0885] EFGR: A 21 mer duplex with 19 bases of complementarity and 3′ dinucleotide overhangs was designed against human EGFR. The sequence of the guide/antisense strand was complementary to the gene sequence starting a base position 333 for the human mRNA transcript for EGFR (ACUCGUGCCUUGGCAAACUUU; SEQ ID NO: 2082). Base, sugar and phosphate modifications were used to optimize the potency of the duplex and reduce immunogenicity. All siRNA single strands were fully assembled on solid phase using standard phospharamidite chemistry and purified over HPLC. Purified single strands were duplexed to get the double stranded siRNA. The passenger strand contained two conjugation handles, a C6-NH₂ at the 5′ end and a C6-SH at the 3′ end. Both conjugation handles were connected to siRNA passenger strand via phosphorothioate-inverted abasic-phosphorothioate linker, see Example 9 for the chemical structure.

[0886] Negative control siRNA sequence (scramble): A published (Burke et al. (2014) Pharm. Res., 31(12):3445-60) 21 mer duplex with 19 bases of complementarity and 3′ dinucleotide overhangs was used. The sequence (5′ to 3′) of the guide/antisense strand was UAUCGACGUGUCCAGCUAGUU (SEQ ID NO: 2116). Base, sugar and phosphate modifications were used to reduce immunogenicity and were comparable to those used in the active siRNA. All siRNA single strands were fully assembled on solid phase using standard phospharamidite chemistry and purified over HPLC. Purified single strands were duplexed to get the double stranded siRNA. The passenger strand contained two conjugation handles, a C6-NH₂ at the 5′ end and a C6-SH at the 3′ end. Both conjugation handles were connected to siRNA passenger strand via a phosphodiester-inverted abasic-phosphodiester linker, see Example 9 for the chemical structure.

### ASC Synthesis and Characterization

[0887] All conjugates were made and purified as a DAR1 (n=1) using ASC architecture-4, as described in Example 9.

### In Vivo Study Design

[0888] Groups 1-7 (n=5) of female SCID SHO mice bearing subcutaneous flank LNCaP tumors 100-350 mm³ in volume were treated with one intravenous (i.v.) tail vein injection of siRNA conjugate, while control group 8 (n=5) of the same mice received one i.v. injection of PBS as a vehicle control. Table 49 describes the study design. Mice were sacrificed by CO₂ asphyxiation at 96 hours post-dose. 50 mg pieces of tumor and liver, were collected and snap-frozen in liquid nitrogen. mRNA knockdown in target tissue was determined using a comparative qPCR assay as described in Example 2. Total RNA was extracted from the tissue, reverse transcribed and mRNA levels were quantified using TaqMan qPCR, using the appropriately designed primers and probes. PPIB (housekeeping gene) was used as an internal RNA loading control, results were calculated by the comparative Ct method, where the difference between the target gene Ct value and the PPIB Ct value (ΔCt) is calculated and then further normalized relative to the PBS control group by taking a second difference (ΔΔCt). Quantitation of tissue siRNA concentrations were determined using a stem-loop qPCR assay as described in Example 2. The antisense strand of the siRNA was reverse transcribed using a TaqMan MicroRNA reverse transcription kit using a sequence-specific stem-loop RT primer. The cDNA from the RT step was then utilized for real-time PCR and Ct values were transformed into plasma or tissue concentrations using the linear equations derived from the standard curves.

TABLE 49

| | | | siRNA | | Dose | | Harvest |
|---|---|---|---|---|---|---|---|
| | Test | | Dose | | Volume | # of | Time |
| Group | Article | N | (mg/kg) | ROA | (mL/kg) | Doses | (h) |
| 1 | PSMA-Ab(Cys)-EGFR-SS-PEG5k | 5 | 1 | IV | 5.0 | 1 | 96 |
| | (n = 1) | | | | | | |
| 2 | PSMA-Ab(Cys)-EGFR-SS-PEG5k | 5 | 0.5 | IV | 5.0 | 1 | 96 |
| | (n = 1) | | | | | | |
| 3 | PSMA-Ab(Cys)-EGFR-ECL-PEG5k | 5 | 1 | IV | 5.0 | 1 | 96 |
| | (n = 1) | | | | | | |
| 4 | PSMA-Ab(Cys)-EGFR-ECL-PEG5k | 5 | 0.5 | IV | 5.0 | 1 | 96 |
| | (n = 1) | | | | | | |
| 5 | PSAM-Ab(Cys)-EGFR-PEG5k | 5 | 1 | IV | 5.0 | 1 | 96 |
| | (n = 1) | | | | | | |
| 6 | PSAM-Ab(Cys)-EGFR-PEG5k | 5 | 0.5 | IV | 5.0 | 1 | 96 |
| | (n = 1) | | | | | | |
| 7 | PSMA-Ab(Cys)-scramble-PEG5k | 5 | 1 | IV | 5.0 | 1 | 96 |
| | (n = 1) | | | | | | |
| 8 | PBS Control | 5 | — | IV | 5.0 | 1 | 96 |

| | | |
|---|---|---|
| Total # of Animals: | 40 | SCID SHO mice with LNCaP tumors |

[0889] As illustrated in FIG. 80A, a variety of different linkers were used between the siRNA and PEG, after i.v administration of a single dose of siRNA measurable tumor tissue EGFR downregulation was achieved relative to the negative control siRNA sequence or PBS controls. In addition, as illustrated in FIG. 80B, the different linker configurations resulted in tumor siRNA accumulation at higher levels than the other tissue samples measured (liver, spleen, lung and kidney).

[0890] In this example, it was demonstrated biological activity with a range of A-X—B—Y—C conjugates in which a variety of different linkers strategies (component Y) were used to conjugate the PEG to the siRNA passenger strand.

### Example 38: 2016-PK-198-HCC827

siRNA Design and Synthesis

[0891] EFGR: A 21 mer duplex with 19 bases of complementarity and 3′ dinucleotide overhangs was designed against human EGFR. The sequence of the guide/antisense strand was complementary to the gene sequence starting a base position 333 for the human mRNA transcript for EGFR (ACUCGUGCCUUGGCAAACUUU; SEQ ID NO: 2082). Base, sugar and phosphate modifications were used to optimize the potency of the duplex and reduce immunogenicity. All siRNA single strands were fully assembled on solid phase using standard phospharamidite chemistry and purified over HPLC. Purified single strands were duplexed to get the double stranded siRNA. The passenger strand contained two conjugation handles, a C6-NH₂ at the 5′ end and a C6-SH at the 3′ end. Both conjugation handles were connected to siRNA passenger strand via phosphorothioate-inverted abasic-phosphorothioate linker, see Example 9 for the chemical structure.

[0892] Negative control siRNA sequence (scramble): A published (Burke et al. (2014) Pharm. Res., 31(12):3445-60) 21 mer duplex with 19 bases of complementarity and 3′ dinucleotide overhangs was used. The sequence (5′ to 3′) of the guide/antisense strand was UAUCGACGUGUCCAGCUAGUU (SEQ ID NO: 2116). Base, sugar and phosphate modifications were used to reduce immunogenicity and were comparable to those used in the active siRNA. All siRNA single strands were fully assembled on solid phase using standard phospharamidite chemistry and purified over HPLC. Purified single strands were duplexed to get the double stranded siRNA. The passenger strand contained two conjugation handles, a C6-NH₂ at the 5′ end and a C6-SH at the 3′ end. Both conjugation handles were connected to siRNA passenger strand via a phosphodiester-inverted abasic-phosphodiester linker, see Example 9 for the chemical structure.

### ASC Synthesis and Characterization

[0893] All conjugates were made and purified as a DAR1 (n=1) using ASC architecture-4, as described in Example 9.

### In Vivo Study Design

[0894] Groups 1-15 (n=5) of female NCr nu/nu mice bearing subcutaneously (SC) flank HCC827 tumors 100-300 mm³ in volume were treated with one intravenous (i.v.) tail vein injection of siRNA conjugate, while control group 16 (n=5) of the same mice received one i.v. injection of PBS as a vehicle control. Table 50 describes the study design. Mice were sacrificed by CO₂ asphyxiation at 96 hours post-dose. 50 mg pieces of tumor and liver, were collected and snap-frozen in liquid nitrogen. mRNA knockdown in target tissue was determined using a comparative qPCR assay as described in Example 2. Total RNA was extracted from the tissue, reverse transcribed and mRNA levels were quantified using TaqMan qPCR, using the appropriately designed primers and probes. PPIB (housekeeping gene) was used as an internal RNA loading control, results were calculated by the comparative Ct method, where the difference between the target gene Ct value and the PPIB Ct value (ΔCt) is calculated and then further normalized relative to the PBS control group by taking a second difference (ΔΔCt). Quantitation of tissue siRNA concentrations were determined using a stem-loop qPCR assay as described in Example 2. The antisense strand of the siRNA was reverse transcribed using a TaqMan MicroRNA reverse transcription kit using a sequence-specific stem-loop RT primer. The cDNA from the RT step was then utilized for real-time PCR and Ct values were transformed into plasma or tissue concentrations using the linear equations derived from the standard curves.

TABLE 50

| | | | siRNA | | Dose | | Harvest |
|---|---|---|---|---|---|---|---|
| | | | Dose | | Volume | # of | Time |
| Group | Test Article | N | (mg/kg) | ROA | (mL/kg) | Doses | (h) |
| 1 | EGFR-Ab(Cys)-EGFR-PEG2k | 5 | 1 | IV | 5.0 | 1 | 96 |
| | (n = 1) | | | | | | |
| 2 | EGFR-Ab(Cys)-EGFR-PEG2k | 5 | 0.5 | IV | 5.0 | 1 | 96 |
| | (n = 1) | | | | | | |
| 3 | EGFR-Ab(Cys)-EGFR-PEG2k | 5 | 0.25 | IV | 5.0 | 1 | 96 |
| | (n = 1) | | | | | | |
| 4 | EGFR-Ab(Cys)-EGFR-dPEG₄₈ | 5 | 1 | IV | 5.0 | 1 | 96 |
| | (n = 1) | | | | | | |
| 5 | EGFR-Ab(Cys)-EGFR-dPEG₄₈ | 5 | 0.5 | IV | 5.0 | 1 | 96 |
| | (n = 1) | | | | | | |
| 6 | EGFR-Ab(Cys)-EGFR-dPEG₄₈ | 5 | 0.25 | IV | 5.0 | 1 | 96 |
| | (n = 1) | | | | | | |
| 7 | EGFR-Ab(Cys)-EGFR-dPEG₂₄ | 5 | 1 | IV | 5.0 | 1 | 96 |
| | (n = 1) | | | | | | |
| 8 | EGFR-Ab(Cys)-EGFR-dPEG₂₄ | 5 | 0.5 | IV | 5.0 | 1 | 96 |
| | (n = 1) | | | | | | |
| 9 | EGFR-Ab(Cys)-EGFR-dPEG₂₄ | 5 | 0.25 | IV | 5.0 | 1 | 96 |
| | (n = 1) | | | | | | |
| 10 | EGFR-Ab(Cys)-EGFR-dPEG₁₂ | 5 | 1 | IV | 5.0 | 1 | 96 |
| | (n = 1) | | | | | | |
| 11 | EGFR-Ab(Cys)-EGFR-dPEG₁₂ | 5 | 0.5 | IV | 5.0 | 1 | 96 |
| | (n = 1) | | | | | | |
| 12 | EGFR-Ab(Cys)-EGFR-dPEG₁₂ | 5 | 0.25 | IV | 5.0 | 1 | 96 |
| | (n = 1) | | | | | | |
| 13 | EGFR-Ab(Cys)-EGFR-PEG5k | 5 | 1 | IV | 5.0 | 1 | 96 |
| | (n = 1) | | | | | | |
| 14 | PSMA-Ab(Cys)-EGFR-PEG5k | 5 | 1 | IV | 5.0 | 1 | 96 |
| | (n = 1) | | | | | | |
| 15 | EGFR-Ab(Cys)-scramble-PEG5k | 5 | 1 | IV | 5.0 | 1 | 96 |
| | (n = 1) | | | | | | |
| 16 | PBS Control | 5 | — | IV | 5.0 | 1 | 96 |

| | | |
|---|---|---|
| Total # of Animals: | 80 | nu/nu mice with HCC827 tumors |

[0895] As illustrated in FIG. 81A, all the ASC with the different configurations of linear PEG length achieved dose dependent EGFR mRNA knockdown in the HCC827 tumor cells, relative to the negative control siRNA sequence (scramble) and PBS controls. As illustrated in FIG. 81B all the ASC with the different configurations in linear PEG length achieved equivalent dose dependent siRNA tumor tissue accumulation. In addition to low liver, lung, kidney and spleen accumulation relative to tumor.

[0896] In this example, it was demonstrated biological activity with a range of A-X—B—Y—C conjugates in which a variety of different PEG (component C) lengths were used.

### Example 39: 2016-PK-194-WT

siRNA Design and Synthesis

[0897] EFGR: A 21 mer duplex with 19 bases of complementarity and 3′ dinucleotide overhangs was designed against human EGFR. The sequence of the guide/antisense strand was complementary to the gene sequence starting a base position 333 for the human mRNA transcript for EGFR (ACUCGUGCCUUGGCAAACUUU; SEQ ID NO: 2082). Base, sugar and phosphate modifications were used to optimize the potency of the duplex and reduce immunogenicity. All siRNA single strands were fully assembled on solid phase using standard phospharamidite chemistry and purified over HPLC. Purified single strands were duplexed to get the double stranded siRNA. The passenger strand contained two conjugation handles, a C6-NH₂ at the 5′ end and a C6-SH at the 3′ end. Both conjugation handles were connected to siRNA passenger strand via phosphorothioate-inverted abasic-phosphorothioate linker, see Example 9 for the chemical structure.

### ASC Synthesis and Characterization

[0898] All conjugates were made and purified as a DAR1 (n=1) using ASC architecture-4, as described in Example 9.

### In Vivo Study Design

[0899] Groups (n=4) of wild-type female CD-1 mice were treated with one intravenous (i.v.) tail vein injections of siRNA conjugates. Treatment groups received 0.5 mg/kg (based on the weight of siRNA) and all groups were administered a dose volume of 5.0 mL/kg. Table 51 illustrates the study design in more detail. Non-terminal blood samples were collected at 5, 30, and 180 minutes post-dose via puncture of the retro-orbital plexus and centrifuged to generate plasma for PK analysis. Mice were sacrificed by CO₂ asphyxiation at 24, 96, or 168 h post-dose. Terminal blood samples were collected via cardiac puncture and processed to generate plasma for PK analysis. Quantitation of plasma siRNA concentrations were determined using a stem-loop qPCR assay as described in Example 2. The antisense strand of the siRNA was reverse transcribed using a TaqMan MicroRNA reverse transcription kit using a sequence-specific stem-loop RT primer. The cDNA from the RT step was then utilized for real-time PCR and Ct values were transformed into plasma or tissue concentrations using the linear equations derived from the standard curves.

TABLE 51

| | | | siRNA | | Dose | | Survival | Terminal |
|---|---|---|---|---|---|---|---|---|
| | | | Dose | | Volume | # of | Bleed | Bleed |
| Group | Test Article | N | (mg/kg) | ROA | (mL/kg) | Doses | (min) | (h) |
| 1 | EGFR-Ab(Cys)-EGFR-PEG2k | 4 | 0.5 | IV | 5.0 | 1 | 5 | 24 |
| 2 | (n = 1) | 4 | 0.5 | IV | 5.0 | 1 | 30 | 96 |
| 3 | | 4 | 0.5 | IV | 5.0 | 1 | 180 | 168 |
| 4 | EGFR-Ab(Cys)-EGFR -dPEG₄₈ | 4 | 0.5 | IV | 5.0 | 1 | 5 | 24 |
| 5 | (n = 1) | 4 | 0.5 | IV | 5.0 | 1 | 30 | 96 |
| 6 | | 4 | 0.5 | IV | 5.0 | 1 | 180 | 168 |
| 7 | EGFR-Ab(Cys)-EGFR -dPEG₂₄ | 4 | 0.5 | IV | 5.0 | 1 | 5 | 24 |
| 8 | (n = 1) | 4 | 0.5 | IV | 5.0 | 1 | 30 | 96 |
| 9 | | 4 | 0.5 | IV | 5.0 | 1 | 180 | 168 |
| 10 | EGFR-Ab(Cys)-EGFR -dPEG₁₂ | 4 | 0.5 | IV | 5.0 | 1 | 5 | 24 |
| 11 | (n = 1) | 4 | 0.5 | IV | 5.0 | 1 | 30 | 96 |
| 12 | | 4 | 0.5 | IV | 5.0 | 1 | 180 | 168 |

| | | |
|---|---|---|
| Total # of Animals: | 48 | WT mice CD-1 |

[0900] As illustrated on slide 54, all the ASC with the different linear PEG lengths achieved equivalent plasma PK profiles, with approximately 10% of the siRNA remaining 168 hours after administration.

[0901] In this example, it was demonstrated equivalent plasma PK properties with a range of A-X—B—Y—C conjugates in which a variety of different PEG (component C) lengths were used.

### Example 40: 2016-PK-195-WT

siRNA Design and Synthesis

[0902] EFGR: A 21 mer duplex with 19 bases of complementarity and 3′ dinucleotide overhangs was designed against human EGFR. The sequence of the guide/antisense strand was complementary to the gene sequence starting a base position 333 for the human mRNA transcript for EGFR (ACUCGUGCCUUGGCAAACUUU; SEQ ID NO: 2082). Base, sugar and phosphate modifications were used to optimize the potency of the duplex and reduce immunogenicity. All siRNA single strands were fully assembled on solid phase using standard phospharamidite chemistry and purified over HPLC. Purified single strands were duplexed to get the double stranded siRNA. The passenger strand contained two conjugation handles, a C6-NH₂ at the 5′ end and a C6-SH at the 3′ end. Both conjugation handles were connected to siRNA passenger strand via phosphorothioate-inverted abasic-phosphorothioate linker, see Example 9 for the chemical structure.

### ASC Synthesis and Characterization

[0903] All conjugates were made and purified as a DAR1 (n=1) using ASC architecture-4, as described in Example 9.

### In Vivo Study Design

[0904] Groups (n=4) of wild-type female CD-1 mice were treated with one intravenous (i.v.) tail vein injections of siRNA conjugates. Treatment groups received 0.5 mg/kg (based on the weight of siRNA) and all groups were administered a dose volume of 5.0 mL/kg. Table 52 illustrates the study design in more detail. Non-terminal blood samples were collected at 5, 30, and 180 minutes post-dose via puncture of the retro-orbital plexus and centrifuged to generate plasma for PK analysis. Mice were sacrificed by CO₂ asphyxiation at 24, 96, or 168 h post-dose. Terminal blood samples were collected via cardiac puncture and processed to generate plasma for PK analysis. Quantitation of plasma siRNA concentrations were determined using a stem-loop qPCR assay as described in Example 2. The antisense strand of the siRNA was reverse transcribed using a TaqMan MicroRNA reverse transcription kit using a sequence-specific stem-loop RT primer. The cDNA from the RT step was then utilized for real-time PCR and Ct values were transformed into plasma or tissue concentrations using the linear equations derived from the standard curves.

TABLE 52

| | | | siRNA | | Dose | | Survival | Terminal |
|---|---|---|---|---|---|---|---|---|
| | | | Dose | | Volume | # of | Bleed | Bleed |
| Gr | Test Article | N | (mg/kg) | ROA | (mL/kg) | Doses | (min) | (h) |
| 1 | EGFR-Ab(Cys)-EGFR-PEG10k | 4 | 0.5 | IV | 5.0 | 1 | 5 | 24 |
| 2 | (n = 1) | 4 | 0.5 | IV | 5.0 | 1 | 30 | 96 |
| 3 | | 4 | 0.5 | IV | 5.0 | 1 | 180 | 168 |
| 4 | EGFR-Ab(Cys)-EGFR-(dPEG24)₃ | 4 | 0.5 | IV | 5.0 | 1 | 5 | 24 |
| 5 | (n = 1) | 4 | 0.5 | IV | 5.0 | 1 | 30 | 96 |
| 6 | | 4 | 0.5 | IV | 5.0 | 1 | 180 | 168 |
| 7 | EGFR-Ab(Cys)-EGFR-(dPEG12)₃ | 4 | 0.5 | IV | 5.0 | 1 | 5 | 24 |
| 8 | (n = 1) | 4 | 0.5 | IV | 5.0 | 1 | 30 | 96 |
| 9 | | 4 | 0.5 | IV | 5.0 | 1 | 180 | 168 |
| 10 | EGFR-Ab(Cys)-EGFR-(dPEG4)₃ | 4 | 0.5 | IV | 5.0 | 1 | 5 | 24 |
| 11 | (n = 1) | 4 | 0.5 | IV | 5.0 | 1 | 30 | 96 |
| 12 | | 4 | 0.5 | IV | 5.0 | 1 | 180 | 168 |

| | | |
|---|---|---|
| Total # of Animals: | 48 | WT mice CD-1 |

[0905] As illustrated in FIG. 83, all the ASC with the different PEG configurations (length and branching) achieved equivalent plasma PK profiles, with approximately 10% of the siRNA remaining 168 hours after administration.

[0906] In this example, it was demonstrated equivalent plasma PK properties with a range of A-X—B—Y—C conjugates in which a variety of different PEG (component C) lengths and branching were used.

### Example 41: 2016-PK-236-HCC827

siRNA Design and Synthesis

[0907] EFGR: A 21 mer duplex with 19 bases of complementarity and 3′ dinucleotide overhangs was designed against human EGFR. The sequence of the guide/antisense strand was complementary to the gene sequence starting a base position 333 for the human mRNA transcript for EGFR (ACUCGUGCCUUGGCAAACUUU; SEQ ID NO: 2082). Base, sugar and phosphate modifications were used to optimize the potency of the duplex and reduce immunogenicity. All siRNA single strands were fully assembled on solid phase using standard phospharamidite chemistry and purified over HPLC. Purified single strands were duplexed to get the double stranded siRNA. The passenger strand contained two conjugation handles, a C6-NH₂ at the 5′ end and a C6-SH at the 3′ end. Both conjugation handles were connected to siRNA passenger strand via phosphorothioate-inverted abasic-phosphorothioate linker, see Example 9 for the chemical structure.

[0908] Negative control siRNA sequence (scramble): A published (Burke et al. (2014) Pharm. Res., 31(12):3445-60) 21 mer duplex with 19 bases of complementarity and 3′ dinucleotide overhangs was used. The sequence (5′ to 3′) of the guide/antisense strand was UAUCGACGUGUCCAGCUAGUU (SEQ ID NO: 2116). Base, sugar and phosphate modifications were used to reduce immunogenicity and were comparable to those used in the active siRNA. All siRNA single strands were fully assembled on solid phase using standard phospharamidite chemistry and purified over HPLC. Purified single strands were duplexed to get the double stranded siRNA. The passenger strand contained two conjugation handles, a C6-NH₂ at the 5′ end and a C6-SH at the 3′ end. Both conjugation handles were connected to siRNA passenger strand via a phosphodiester-inverted abasic-phosphodiester linker, see Example 9 for the chemical structure.

### ASC Synthesis and Characterization

[0909] All conjugates were made and purified as a DAR1 (n=1) using ASC architecture-4, as described in Example 9.

### In Vivo Study Design

[0910] Groups 1-12 (n=5) of female NCr nu/nu mice bearing subcutaneously (SC) flank HCC827 tumors 100-300 mm³ in volume were treated with one intravenous (i.v.) tail vein injection of siRNA conjugate, while control group 13 (n=5) of the same mice received one i.v. injection of PBS as a vehicle control. Table 53 describes the study design. Mice were sacrificed by CO₂ asphyxiation at 96 hours post-dose. 50 mg pieces of tumor and liver, were collected and snap-frozen in liquid nitrogen. mRNA knockdown in target tissue was determined using a comparative qPCR assay as described in Example 2. Total RNA was extracted from the tissue, reverse transcribed and mRNA levels were quantified using TaqMan qPCR, using the appropriately designed primers and probes. PPIB (housekeeping gene) was used as an internal RNA loading control, results were calculated by the comparative Ct method, where the difference between the target gene Ct value and the PPIB Ct value (ΔCt) is calculated and then further normialized relative to the PBS control group by taking a second difference (ΔΔCt). Quantitation of tissue siRNA concentrations were determined using a stem-loop qPCR assay as described in Example 2. The antisense strand of the siRNA was reverse transcribed using a TaqMan MicroRNA reverse transcription kit using a sequence-specific stem-loop RT primer. The cDNA from the RT step was then utilized for real-time PCR and Ct values were transformed into plasma or tissue concentrations using the linear equations derived from the standard curves.

TABLE 53

| | | | siRNA | | Dose | | Harvest |
|---|---|---|---|---|---|---|---|
| | | | Dose | | Volume | # of | Time |
| Group | Test Article | N | (mg/kg) | ROA | (mL/kg) | Doses | (h) |
| 1 | EGFR-Ab(Cys)-EGFR-PEG10k | 5 | 1 | IV | 5.0 | 1 | 96 |
| | (n = 1) | | | | | | |
| 2 | EGFR-Ab(Cys)-EGFR-PEG10k | 5 | 0.5 | IV | 5.0 | 1 | 96 |
| | (n = 1) | | | | | | |
| 3 | EGFR-Ab(Cys)-EGFR-PEG10k | 5 | 0.25 | IV | 5.0 | 1 | 96 |
| | (n = 1) | | | | | | |
| 4 | EGFR-Ab(Cys)-EGFR-(dPEG24)3 | 5 | 1 | IV | 5.0 | 1 | 96 |
| | (n = 1) | | | | | | |
| 5 | EGFR-Ab(Cys)-EGFR-(dPEG24)3 | 5 | 0.5 | IV | 5.0 | 1 | 96 |
| | (n = 1) | | | | | | |
| 6 | EGFR-Ab(Cys)-EGFR-(dPEG24)3 | 5 | 0.25 | IV | 5.0 | 1 | 96 |
| | (n = 1) | | | | | | |
| 7 | EGFR-Ab(Cys)-EGFR-(dPEG12)3 | 5 | 1 | IV | 5.0 | 1 | 96 |
| | (n = 1) | | | | | | |
| 8 | EGFR-Ab(Cys)-EGFR-(dPEG12)3 | 5 | 0.5 | IV | 5.0 | 1 | 96 |
| | (n = 1) | | | | | | |
| 9 | EGFR-Ab(Cys)-EGFR-(dPEG12)3 | 5 | 0.25 | IV | 5.0 | 1 | 96 |
| | (n = 1) | | | | | | |
| 10 | EGFR-Ab(Cys)-EGFR-(dPEG4)3 | 5 | 1 | IV | 5.0 | 1 | 96 |
| | (n = 1) | | | | | | |
| 11 | EGFR-Ab(Cys)-EGFR-PEG5k | 5 | 1 | IV | 5.0 | 1 | 96 |
| | (n = 1) | | | | | | |
| 12 | EGFR-Ab(Cys)-scramble-PEG5k | 5 | 1 | IV | 5.0 | 1 | 96 |
| | (n = 1) | | | | | | |
| 13 | PBS Control | 5 | — | IV | 5.0 | 1 | 96 |

| | | |
|---|---|---|
| Total # of Animals: | 65 | nu/nu mice with HCC827 tumors |

[0911] As illustrated in FIG. 84, all the ASC with the different configurations of PEG (length and branching) achieved equivalent EGFR mRNA knockdown in the HCC827 tumor cells to the construct with the linear PEGSK at the 1 mg/kg dose. Those constructs tested in a dose response formiat, showed dose dependent knockdown of EGFR mRNA. As illustrated in FIG. 85, all the ASC with the different variations in linear PEG length and PEG branching achieved equivalent siRNA tumor tissue accumulation to the construct with the linear PEG5K at the 1 mg/kg dose. In addition to low liver accumulation relative to tumor, those constructs tested in a dose response format, showed dose dependent tumor tissue accumulation of siRNA.

[0912] In this example, it was demonstrated biological activity with a range of A-X—B—Y—C conjugates in which a variety of different PEG (component C) lengths and branching were used.

### Example 42: In Vitro Knockdown with ASCs with PEG Polymers

siRNA Design and Synthesis

[0913] HPRT: A 21 mer duplex with 19 bases of complementarity and 3′ dinucleotide overhangs was designed against human HPRT. The sequence of the guide/antisense strand was AUAAAAUCUACAGUCAUAGUU (SEQ ID NO: 2082) and design to be complementary to the gene sequence starting a base position 425 for the human mRNA transcript for HPRT. Base, sugar and phosphate modifications were used to optimize the potency of the duplex and reduce immunogenicity. All siRNA single strands were fully assembled on solid phase using standard phospharamidite chemistry and purified over HPLC. Purified single strands were duplexed to get the double stranded siRNA. The passenger strand contained two conjugation handles, a C6-NH₂ at the 5′ end and a C6-SH at the 3′ end. Both conjugation handles were connected to siRNA passenger strand via phosphodiester-inverted abasic-phosphorothioate linker. The C6-NH₂ and C6-SH were connected through the phosphodiester, see Example 9 for the chemical structure.

[0914] Negative control siRNA sequence (scramble): A published (Burke et al. (2014) Pharm. Res., 31(12):3445-60) 21 mer duplex with 19 bases of complementarity and 3′ dinucleotide overhangs was used. The sequence (5′ to 3′) of the guide/antisense strand was UAUCGACGUGUCCAGCUAGUU (SEQ ID NO: 2116). The same base, sugar and phosphate modifications that were used for the active EGFR siRNA duplex were used in the negative control siRNA. All siRNA single strands were fully assembled on solid phase using standard phospharamidite chemistry and purified over HPLC. Purified single strands were duplexed to get the double stranded siRNA. The passenger strand contained two conjugation handles, a C6-NH₂ at the 5′ end and a C6-SH at the 3′ end. Both conjugation handles were connected to siRNA passenger strand via a phosphodiester-inverted abasic-phosphodiester linker, see Example 9 for the chemical structure.

### ASC Synthesis and Characterization

[0915] Conjugates in groups 1-3 made and purified as a DAR1 (n=1) using ASC architecture-1, as described in Example 9. Conjugates in groups 4-6 were made and purified as a DAR1 (n=1) using ASC architecture-4, as described in Example 9.

### In Vitro Study Design

[0916] Mouse spleens were harvested and kept in PBS with 100 u/ml penicillin and streptomycin on ice. Spleens were smashed with clean glass slides, cut into small pieces, homogenized with 18G needles, and filtered (70 um nylon membrane). Dead cells were removed with the dead cell removal kit from Milteny biotec (Catalog #130-090101) according to manufacturer instruction. To isolate mouse B cells, B cell isolation kit Milteny biotec (Catalog #130-090-862) was used following manufacturer instruction. Briefly, live spleen cells were resuspended with 200 μl of MACS buffer per mouse spleen. Non-B cells were depleted with biotin-conjugated monoclonal antibodies against CD43 (Ly48), CD4, and Ter-119, coupled with anti-biotin magnetic microbeads. From one mouse spleen, 30 million live B cells can be obtained. To activate isolated mouse B cells (2×10⁶/ml in 10% FBS RPMI-1640 with 100 u/ml penicillin and streptomycin), a cocktail of 10 μg/ml LPS, 5 μg/ml anti-IgM, 1 μg/ml anti-CD40, 0.05 μg/ml IL-4, and 0.05 μg/ml INFγ was added. After four hours of activation, ASCs (1 μM to 10 nM) were added to 10⁶ cells per well in 24 (0.5 ml media) or 12 (1 ml media) well plates. After 48 hours of ASC treatments, cells were harvested and isolated RNAs were analyzed for mRNA knockdown. See Table 54 for the study design.

TABLE 54

| Group | Test Article |
|---|---|
| 1 | Anti-B cell Ab(Lys)-S3′-HPRT-5′N-pOEGMA8K |
| 2 | Anti-B cell Ab(Lys)-S3′-HPRT-5′N-pHPMA5K |
| 3 | Anti-B cell Ab(Lys)-S3′-HPRT-5′N-pHPMA10K |
| 4 | Anti-B cell Ab(Cys)-N5′-HPRT-3′S-pMAA10K |
| 5 | Anti-B cell Ab(Cys)-N5′-HPRT-3′S-PEG5K |
| 6 | Anti-B cell Ab(Cys)-N5′-scramble-3′S-PEG5K |

[0917] In this in vitro experiment in activated primary mouse B cells, the ability of an anti-B cell antibody ASCs to deliver an siRNA design to downregulate Hypoxanthine-guanine phosphoribosyltransferase (HPRT) with a range of alternative PEG polymers were measured. As illustrated in FIG. 86, the range of ASC with alternative PEGs were able to downregulate HPRT relative to the scramble control.

[0918] In this example, the biological activity was demonstrated with a range of A-X—B—Y—C conjugates in which a variety of polymer alternatives to PEG (component C) were used.

### Example 43: PK-236-WT

siRNA Design and Synthesis

[0919] KRAS: A 21 mer duplex with 19 bases of complementarity and 3′ dinucleotide overhangs was designed against human KRAS. The sequence of the guide/antisense strand was complementary to the gene sequence starting a base position 237 for the human mRNA transcript for KRAS (Guide strand sequence: UGAAUUAGCUGUAUCGUCAUU; SEQ ID NO: 2088). Base, sugar and phosphate modifications that are well described in the field of RNAi were used to optimize the potency of the duplex and reduce immunogenicity. All siRNA single strands were fully assembled on solid phase using standard phospharamidite chemistry and purified over HPLC. The base at position 11 on the passenger strand had a Cy5 fluorescent label attached, as described in Example 9. Purified single strands were duplexed to get the double stranded siRNA. The passenger strand contained two conjugation handles, a C6-NH₂ at the 5′ end and a C6-SH at the 3′ end. Both conjugation handles were connected to siRNA passenger strand via a phosphodiester-inverted abasic-phosphodiester linker, see Example 9 for the chemical structure.

### ASC Synthesis and Characterization

[0920] Conjugates in groups 1-3 were made and purified as a DAR1 (n=1) using ASC architecture-4, as described in Example 9. Conjugates in groups 4-6 were made and purified as a DAR1 (n=1) using ASC architecture-4, but there was no PEG on the 3′ end of the passenger strand. Prior to conjugateion, the 3′thiol was end-capped using N-ethylmaleimide. Conjugates in groups 7-9 were made and purified as a DAR1 (n=1) using ASC architecture-1, as described in Example 9. Conjugates in groups 10-12 made and purified as a DAR1 (n=1) using ASC architecture-1, but there was no PEG on the 5′ end of the passenger strand.

### In Vivo Study Design

[0921] Groups (n=4) of wild-type female CD-1 mice were treated with one intravenous (i.v.) tail vein injections of siRNA conjugates. Treatment groups received 0.5 mg/kg (based on the weight of siRNA) and all groups were administered a dose volume of 5.0 mL/kg. Table 55 illustrates the study design in more detail. Non-terminal blood samples were collected at 0.25, 1, and 4 hours post-dose via puncture of the retro-orbital plexus and centrifuged to generate plasma for PK analysis. Mice were sacrificed by CO₂ asphyxiation at 24, 48, or 72 h post-dose. Terminal blood samples were collected via cardiac puncture and processed to generate plasma for PK analysis.

[0922] Plasma samples (K2 EDTA) were processed within 4 hours after harvesting. Plasma samples were diluted with matching mouse plasma (Bioreclamation) (2-400 fold) and the concentration of CY5-siRNA in these plasma samples quantified spectroscopically using a TECAN Infinite M200 Pro (Excitation 635 nm; Emission 675 nm). To release macromolecular interactions that might quench the CY5 fluorescence, all samples were diluted 2-fold into water containing 0.01% Tween 20 and 100 ug/ml heparin prior to quantification. To determine the amount of intact ASCs in these plasma samples, plasma samples were diluted with mouse plasma to 2-50 nM CY5-siRNA and incubated with Protein G Dynabeads (Thermofisher) loaded with 150 nM of a purified EGFR-Fc protein (Sino Biological). These binding reactions were incubated at RT for 1 hour. Beads were washed twice with PBS containing 0.01% Tween 20 and 0.05 BSA before ASCs bound to EGFR were eluted by incubation in 0.1 M citric acid (pH 2.7). The amount of CY5-siRNA contained in the input, unbound fraction, washes and bead eluate was quantified by fluorescence as stated above.

TABLE 55

| | | | siRNA | | Dose | | Survival | Terminal |
|---|---|---|---|---|---|---|---|---|
| | | | Dose | | Volume | # of | Bleed | Bleed |
| Gr | Test Article | N | (mg/kg) | ROA | (mL/kg) | Doses | (h) | (h) |
| 1 | EGFR-Ab(Cys)-N5′-Cy5.KRAS-3′S-PEG5k | 4 | 0.5 | IV | 5.0 | 1 | 0.25 | 24 |
| | (n = 1) | | | | | | | |
| 2 | EGFR-Ab(Cys)-N5′-Cy5.KRAS-3′S-PEG5k | 4 | 0.5 | IV | 5.0 | 1 | 1 | 48 |
| | (n = 1) | | | | | | | |
| 3 | EGFR-Ab(Cys)-N5′-Cy5.KRAS-3′S-PEG5k | 4 | 0.5 | IV | 5.0 | 1 | 4 | 72 |
| | (n = 1) | | | | | | | |
| 4 | EGFR-Ab(Cys)-N5′-Cy5.KRAS-3′S--NEM | 4 | 0.5 | IV | 5.0 | 1 | 0.25 | 24 |
| | (n = 1) | | | | | | | |
| 5 | EGFR-Ab(Cys)-N5′-Cy5.KRAS-3′S--NEM | 4 | 0.5 | IV | 5.0 | 1 | 1 | 48 |
| | (n = 1) | | | | | | | |
| 6 | EGFR-Ab(Cys)-N5′-Cy5.KRAS-3′S--NEM | 4 | 0.5 | IV | 5.0 | 1 | 4 | 72 |
| | (n = 1) | | | | | | | |
| 7 | EGFR-Ab(Lys)-S3′-Cy5.KRAS-5′N-PEG5k | 4 | 0.5 | IV | 5.0 | 1 | 0.25 | 24 |
| | (n = 1) | | | | | | | |
| 8 | EGFR-Ab(Lys)-S3′-Cy5.KRAS-5′N-PEG5k | 4 | 0.5 | IV | 5.0 | 1 | 1 | 48 |
| | (n = 1) | | | | | | | |
| 9 | EGFR-Ab(Lys)-S3′-Cy5.KRAS-5′N-PEG5k | 4 | 0.5 | IV | 5.0 | 1 | 4 | 72 |
| | (n = 1) | | | | | | | |
| 10 | EGFR-Ab(Lys)-S3′-Cy5.KRAS-5′NH₂ | 4 | 0.5 | IV | 5.0 | 1 | 0.25 | 24 |
| | (n = 1) | | | | | | | |
| 11 | EGFR-Ab(Lys)-S3′-Cy5.KRAS-5′NH₂ | 4 | 0.5 | IV | 5.0 | 1 | 1 | 48 |
| | (n = 1) | | | | | | | |
| 12 | EGFR-Ab(Lys)-S3′-Cy5.KRAS-5′NH₂ | 4 | 0.5 | IV | 5.0 | 1 | 4 | 72 |
| | (n = 1) | | | | | | | |

| | | |
|---|---|---|
| Total # of Animals: | 96 | WT mice CD-1 |

[0923] In this in vivo PK study, the in vivo plasma stability of two AXBYC conjugates (cysteine and lysine conjugation to the EGFR-Ab) relative to two AXB conjugates were compared. As illustrated in FIG. 87, the concentration of the siRNA was determined using two methods. The fluorescence of the plasma was measured directly and the siRNA concentration determined using a standard curve. Or a magnetic bead decorated with EGFR was used to bind the antibody conjugates and then the fluorescence of the sample was measured and the siRNA concentration determined using a standard curve. All data were plotted as a percentage of the injected dose. In both examples of the AXBYC conjugates (cysteine and lysine conjugation to the EGFR-Ab) improved plasma PK were observed relative to the corresponding AXB conjugate.

[0924] In this example, in vivo plasma PK for the Cys and Lys AXBYC conjugates compared to the matching control AXB conjugates was demonstrate.

### Example 44: In Vivo Pharmacodynamics Study of a Cholesterol-KRAS Conjugate (PD-058)

[0925] Groups (n=5) of female NCr nu/nu mice bearing intrahepatic Hep 3B tumors one week after inoculation were treated with three intravenous (i.v.) tail vein injections (separated by 48 h) of cholesterol-siRNA conjugate, while control groups (n=5) of the same mice received three i.v. injections of PBS as a vehicle control on the same dosing schedule. Treatment groups that received chol-KRAS were dosed at 10, 4, or 2 mg/kg. All groups (treatments and controls) were administered a dose volume of 6.25 mL/kg. Table 56 describes the study design in more detail and gives a cross-reference to the conjugate synthesis and characterization. Mice were sacrificed by CO₂ asphyxiation at 72 h post-final dose. 50 mg pieces of tumor-bearing liver were collected and snap-frozen in liquid nitrogen. mRNA knockdown analysis and siRNA quantitation were performed as described in Examples 2-7.

TABLE 56
Study design for a Cholesterol-KRAS Conjugate (PD-
058) with a cross-reference to the synthesis and
characterization of the conjugates tested.

| | | | siRNA | | | Cross-reference |
|---|---|---|---|---|---|---|
| | | | Dose | | # of | for synthesis and |
| Group | Test Article | N | (mg/kg) | ROA | Doses | characterization |
| 1 | Chol-KRAS | 5 | 10 | iv | 3 | General |
| | | | | | | experimental |
| | | | | | | (Example 2) |
| 2 | Chol-KRAS | 5 | 4 | iv | 3 | General |
| | | | | | | experimental |
| | | | | | | (Example 2) |
| 3 | Chol-KRAS | 5 | 2 | iv | 3 | General |
| | | | | | | experimental |
| | | | | | | (Example 2) |
| 4 | Vehicle | 5 | | iv | 3 | |
| | (PBS) | | | | | |

[0926] The chol-KRAS conjugate was assessed for mRNA knockdown in a 3-dose study with a dose response. As illustrated in FIG. 35, within the mouse liver tissue there was a clear dose-response for mouse KRAS mRNA knockdown. The lowest dose of 2 mg/kg resulted in 45% knockdown of mouse KRAS, while the highest dose of 10 mg/kg resulted in 65% knockdown of mouse KRAS in this 3-dose format. However, there were not enough human tumor cells in the mouse liver at the time of harvest to detect a signal from human KRAS (potentially due to model development issues, it appeared that not enough human cells were inoculated to produce fast-growing tumors). As such, it was not possible to measure the knockdown in tumor.

### Example 45: In Vivo Pharmacokinetics Study of a Cholesterol-siRNA Conjugate (PK-063)

[0927] Groups (n=3) of wild-type female CD-1 mice were treated with either one or two intravenous (i.v.) tail vein injections of chol-siRNA conjugate. Treatment groups received chol-KRAS at 10 mg/kg (based on the weight of siRNA) and the 2-dose groups received the second dose 48 h after the first dose. All groups were administered a dose volume of 6.25 mL/kg. Table 57 illustrates the study design in more detail and gives a cross-reference to the conjugate synthesis and characterization. Non-terminal blood samples were collected at 2, 15, 60 or 120 minutes post-final dose via puncture of the retro-orbital plexus and centrifuged to generate plasma for PK analysis. Mice were sacrificed by CO₂ asphyxiation at 4, 24, 96, or 144 h post-final dose. Terminal blood samples were collected via cardiac puncture and processed to generate plasma for PK analysis. 50 mg pieces of tumor, liver, kidney, and lung were collected and snap-frozen in liquid nitrogen. mRNA knockdown analysis and siRNA quantitation were performed as described in Examples 2-7.

TABLE 57
Study design for a Cholesterol-siRNA Conjugate (PK-063) with a cross-reference
to the synthesis and characterization of the conjugates tested.

| | | | siRNA | | | Survival | Terminal | Harvest | Cross-reference |
|---|---|---|---|---|---|---|---|---|---|
| | Test | | Dose | | # of | Bleed | Bleed | Time | to synthesis and |
| Group | Article | N | (mg/kg) | ROA | Doses | (min) | (h) | (h) | characterization |
| 1 | Chol-KRAS | 3 | 10 | IV | 1 | 2 | 4 | 4 | General |
| 2 | | 3 | 10 | IV | 1 | 15 | 24 | 24 | experimental |
| 3 | | 3 | 10 | IV | 1 | 60 | 96 | 96 | (Example 2) |
| 4 | | 3 | 10 | IV | 1 | 120 | 144 | 144 | |
| 5 | Chol-KRAS | 3 | 10 | IV | 2 | 2 | 4 | 4 | General |
| 6 | | 3 | 10 | IV | 2 | 15 | 24 | 24 | experimental |
| 7 | | 3 | 10 | IV | 2 | 60 | 96 | 96 | (Example 2) |
| 8 | | 3 | 10 | IV | 2 | 120 | 144 | 144 | |

[0928] The pharmacokinetic behavior of chol-siRNA was assessed in a single-dose format compared to a 2-dose format. As illustrated from FIG. 36, the plasma PK profiles for the first dose and a second dose following 48 h later are nearly identical. The mechanism for clearance from plasma has not saturated from the first dose and the second dose behaves similarly. The tissue PK for 3 major tissues (the liver, kidneys, and lungs) was similarly assessed. As illustrated from FIG. 37, chol-KRAS was delivered to liver in the highest concentrations, with kidneys and lungs having approximately 10-fold lower siRNA concentrations compared to liver. For all three tissues, the siRNA concentrations following the second doses were higher than the siRNA concentrations following the first dose, demonstrating that there is accumulation of siRNA in tissues when doses of chol-siRNA are spaced by 48 h.

[0929] In vivo study a Cholesterol-siRNA Conjugate (PK-067). Groups (n=3) of female NCr nu/nu mice bearing subcutaneous flank H358 tumors 100-150 mm³ in volume were treated with one intravenous (i.v.) tail vein injection of siRNA conjugate, while control groups (n=4) of the same mice received one i.v. injection of PBS as a vehicle control. Treatment groups that received cholesterol-siRNA conjugates were dosed at 5 mg/kg (based on the weight of siRNA). Some treatment groups also received cholesterol-peptide conjugates at specified molar peptide:siRNA ratios, where all chol-siRNA and chol-peptide conjugates were mixed together in solution and co-injected. All groups (treatments and controls) were administered a dose volume of 5 mL/kg. Table 58 shows the study design in more detail and gives a cross-reference to the conjugate synthesis and characterization. Mice were sacrificed by CO₂ asphyxiation at 24, 72, or 144 h post-dose. 50 mg pieces of tumor, liver, kidneys, and lungs were collected and snap-frozen in liquid nitrogen. mRNA knockdown analysis and siRNA quantitation were performed as described in Examples 2-7.

TABLE 58
Study design for a Cholesterol-siRNA Conjugate (PK-067) with a
cross-reference to the conjugate synthesis and characterization

| | | | | mol | | | | |
|---|---|---|---|---|---|---|---|---|
| | | | siRNA | EEP/mol | | | Harvest | Cross-reference |
| | Test | | Dose | siRNA | | # of | Time | to synthesis and |
| Group | Article | N | (mg/kg) | Ratio | ROA | Doses | (h) | characterization |
| 1 | chol-KRAS | 3 | 5 | — | IV | 1 | 24 | General |
| 2 | | 3 | 5 | — | IV | 1 | 72 | experimental |
| 3 | | 3 | 5 | — | IV | 1 | 144 | (Example 2) |
| 4 | chol-KRAS + | 3 | 5 | 1 | IV | 1 | 24 | General |
| 5 | chol-Melittin | 3 | 5 | 1 | IV | 1 | 72 | experimental |
| 6 | | 3 | 5 | 1 | IV | 1 | 144 | (Example 2) |
| 7 | chol-KRAS + | 3 | 5 | 3 | IV | 1 | 24 | General |
| 8 | chol-Melittin | 3 | 5 | 3 | IV | 1 | 72 | experimental |
| 9 | | 3 | 5 | 3 | IV | 1 | 144 | (Example 2) |
| 10 | chol-KRAS + | 3 | 5 | 10 | IV | 1 | 24 | General |
| 11 | chol-Melittin | 3 | 5 | 10 | IV | 1 | 72 | experimental |
| 12 | | 3 | 5 | 10 | IV | 1 | 144 | (Example 2) |
| 13 | chol-KRAS + | 3 | 5 | 1 | IV | 1 | 24 | General |
| 14 | chol-INF7 | 3 | 5 | 1 | IV | 1 | 72 | experimental |
| 15 | | 3 | 5 | 1 | IV | 1 | 144 | (Example 2) |
| 16 | chol-KRAS + | 3 | 5 | 3 | IV | 1 | 24 | General |
| 17 | chol-INF7 | 3 | 5 | 3 | IV | 1 | 72 | experimental |
| 18 | | 3 | 5 | 3 | IV | 1 | 144 | (Example 2) |
| 19 | chol-KRAS + | 3 | 5 | 10 | IV | 1 | 24 | General |
| 20 | chol-INF7 | 3 | 5 | 10 | IV | 1 | 72 | experimental |
| 21 | | 3 | 5 | 10 | IV | 1 | 144 | (Example 2) |
| 22 | Vehicle (PBS) | 4 | — | — | IV | 1 | 24 | General |
| 23 | | 4 | — | — | IV | 1 | 72 | experimental |
| 24 | | 4 | — | — | IV | 1 | 144 | (Example 2) |

| | | |
|---|---|---|
| Total # of Animals: | 75 | nu/nu mice with H358 tumors |

[0930] Endosomolytic moieties (EEPs) such as INF7 and melittin were conjugated to cholesterol, mixed with chol-siRNA, and then co-injected into mice to demonstrate an increase in siRNA potency due to the improved endosomal escape. First, the effect of adding the EEPs on the siRNA concentration in various tissues was assessed. As illustrated in FIG. 38A, the addition of chol-INF7 at any of the molar ratios of EEP:siRNA did not affect the siRNA tumor PK. However, as illustrated in FIG. 38B, the addition of chol-melittin at a 1:1 ratio did not affect the tumor PK but the addition of chol-melittin at a 3:1 EEP:siRNA ratio decreased the amount of siRNA in tumor. As illustrated in FIG. 39, neither chol-INF7 nor chol-melittin had much of an impact on the liver PK. Similarly, as illustrated in FIGS. 40 and 41, the chol-INF7 and chol-melittin also did not have much of an impact on the PK profile in kidneys and lungs. Finally, the effect of the chol-EEP conjugates on mRNA KD was assessed and, as shown in FIG. 42, the baseline level of knockdown for chol-KRAS alone was approximately 50%. The addition of 1:1 chol-melittin or 3:1 chol-INF7 improves the knockdown at each time point, due to improved endosomal escape.

[0931] In vivo study a Cholesterol-siRNA Conjugate (PK-076). Groups (n=5) of female NCr nu/nu mice bearing subcutaneous flank H358 tumors 100-150 mm³ in volume were treated with three intravenous (i.v.) tail vein injections of siRNA conjugate separated by 48 h, while control groups (n=5) of the same mice received three i.v. injections of PBS as a vehicle control on the same dosing schedule. Treatment groups that received cholesterol-siRNA conjugates were dosed at 5 mg/kg (based on the weight of siRNA). Some treatment groups also received cholesterol-peptide conjugates at specified molar peptide:siRNA ratios, where all chol-siRNA and chol-peptide conjugates were mixed together in solution and co-injected. All groups (treatments and controls) were administered a dose volume of 5 mL/kg. Table 59 describes the study design in more detail and gives a cross-reference to the conjugate synthesis and characterization. Mice were sacrificed by CO₂ asphyxiation at 24 or 96 h post-dose. 50 mg pieces of tumor, liver, kidneys, and lungs were collected and snap-frozen in liquid nitrogen. mRNA knockdown analysis and siRNA quantitation were performed as described in Examples 2-7.

TABLE 59
Study design for a Cholesterol-siRNA Conjugate (PK-076) with a cross-reference
to the synthesis and characterization of the conjugates tested.

| | | | | EEP/ | | | | |
|---|---|---|---|---|---|---|---|---|
| | | | siRNA | siRNA | | | Harvest | Cross-reference |
| | | | Dose | Ratio | | # of | Time | to synthesis and |
| Group | Test Article | N | (mg/kg) | (mol/mol) | ROA | Doses | (h) | characterization |
| 1 | chol-KRAS | 5 | 5 | — | IV | 3 | 24 | General |
| 2 | | 5 | 5 | — | IV | 3 | 96 | experimental |
| | | | | | | | | (Example 2) |
| 3 | chol-KRAS + | 5 | 5 | 1 | IV | 3 | 24 | General |
| 4 | chol-melittin | 5 | 5 | 1 | IV | 3 | 96 | experimental |
| | (1:1) | | | | | | | (Example 2) |
| 5 | chol-KRAS + | 5 | 5 | 3 | IV | 3 | 24 | General |
| 6 | chol-INF7 | 5 | 5 | 3 | IV | 3 | 96 | experimental |
| | (3:1) | | | | | | | (Example 2) |
| 7 | Vehicle | 5 | — | — | IV | 3 | 24 | |
| 8 | | 5 | — | — | IV | 3 | 96 | |

[0932] The activity seen in the single-dose study with chol-siRNA and chol-EEP was followed up with a three dose study. The 3:1 ratio of EEP:siRNA was selected for INF7, and the 1:1 ratio was selected for melittin. As illustrated in FIG. 43 and FIG. 44, the addition of either chol-EEP to the chol-siRNA does not seem to greatly affect the tissue PK following three doses. As for the knockdown, FIG. 45 shows that addition of chol-melittin clearly improves tumor knockdown 24 h post-dose. It also shows that chol-melittin improves tumor knockdown at 96 h post-dose.

[0933] In vivo study a Cholesterol-siRNA Conjugate (PK-079). Groups (n=5) of female NCr nu/nu mice bearing subcutaneous flank H358 tumors 100-150 mm³ in volume were treated with one intravenous (i.v.) tail vein injection of siRNA conjugate, while control groups (n=5) of the same mice received one i.v. injection of PBS as a vehicle control. Treatment groups that received EGFR antibody-siRNA-PEG conjugates were dosed at 0.5 mg/kg (based on the weight of siRNA) and groups that also received EGFR antibody-melittin had the dose of EGFR-Ab matched between EGFR antibody-siRNA and EGFR antibody-melittin. All groups (treatments and controls) were administered a dose volume of 5 mL/kg. Table 60 describes the study design in more detail and gives a cross-reference to the conjugate synthesis and characterization. Mice were sacrificed by CO₂ asphyxiation at 96 h post-dose. 50 mg pieces of tumor, liver, kidney, and lung were collected and snap-frozen in liquid nitrogen. mRNA knockdown analysis and siRNA quantitation were performed as described in Examples 2-7.

TABLE 60
Study design for a Cholesterol-siRNA Conjugate (PK-079) with a cross-reference
to the synthesis and characterization of the conjugates tested.

| | | | siRNA | siRNA:EGFR- | melittin:siRNA | | | Harvest | Cross-reference |
|---|---|---|---|---|---|---|---|---|---|
| | | | Dose | Ab Ratio | Ratio | | # of | Time | to synthesis and |
| Group | Test Article | N | (mg/kg) | (mol/mol) | (mol/mol) | ROA | Doses | (h) | characterization |
| 1 | EGFR-Ab- | 5 | 0.5 | 1 | — | IV | 1 | 96 | Example 4 |
| | PEG5k-EGFR | | | | | | | | |
| 2 | EGFR-Ab- | 5 | 0.5 | 1 | 1:1 | IV | 1 | 96 | Example 3 and 6 |
| | PEG5k-EGFR + | | | | | | | | |
| | EGFR-Ab- | | | | | | | | |
| | melittin | | | | | | | | |
| 3 | EGFR-Ab- | | | | | | | | |
| | KRAS-PEG5k + | 5 | 0.5 | 1 | 1:1 | IV | 1 | 96 | Example 3 and 6 |
| | EGFR-Ab- | | | | | | | | |
| | melittin | | | | | | | | |
| 4 | EGFR antibody | 5 | — | — | — | IV | 1 | 96 | General |
| | Alone | | | | | | | | experimental |
| | | | | | | | | | (Example 2) |
| 5 | Vehicle | 5 | — | — | — | IV | 1 | 96 | |

[0934] The PK/PD relationship for EGFR antibody-siRNA conjugates to deliver siRNA to tumor and produce mRNA knockdown in tumor was evaluated for reproducibility. As illustrated in FIG. 46, once again a single i.v. dose of 0.5 mg/kg of EGFR antibody-siRNA conjugate was able to deliver approximate 100 nM concentrations of siRNA into tumor with both configurations of the conjugate. The addition of EGFR antibody-melittin did not appear to impact the tissue PK. Out of the four tissues analyzed, tumor had the highest concentration and liver the second highest, with kidneys and lungs showing low uptake of siRNA. As illustrated in FIG. 47, the strong siRNA delivery to tumor once again translated into approximately 50% knockdown of EGFR or KRAS in the tumors. Free EGFR-Ab, run as a control group, showed no mRNA knockdown as did the PBS control.

[0935] In vivo study a Cholesterol-siRNA Conjugate (PD-077). Groups (n=11) of female NCr nu/nu mice bearing intrahepatic Hep3B tumors one week after inoculation were treated with nine intravenous (i.v.) or subcutaneous (s.c.) injections (TlW) of cholesterol-siRNA conjugate, while control groups (n=11) of the same mice received nine i.v. tail vein injections of PBS as a vehicle control (also dosed TIW). Treatment groups that received chol-CTNNB1 were dosed at 5 mg/kg. All groups (treatments and controls) were administered a dose volume of 6.25 mL/kg. Table 61 describes the study design in more detail and gives a cross-reference to the conjugate synthesis and characterization. Non-terminal blood samples were collected once per week via puncture of the retro-orbital plexus and processed to generate serum for alpha-Fetoprotein (AFP) measurement. Mice were sacrificed by CO₂ asphyxiation at 24 h post-final dose. 50 mg pieces of tumor-bearing liver were collected and snap-frozen in liquid nitrogen. mRNA knockdown analysis was performed as described above. AFP was quantified using the Human alpha-Fetoprotein DuoSet ELISA kit (R&D Systems) according to the manufacturer's instructions.

TABLE 61
Study design for a Cholesterol-siRNA Conjugate (PK-077) with a cross-reference
to the synthesis and characterization of the conjugates tested.

| | | | siRNA | | | | Terminal | Cross-reference |
|---|---|---|---|---|---|---|---|---|
| | | | Dose | | # of | Survival | Bleed | to synthesis and |
| Group | Test Article | N | (mg/kg) | ROA | Doses | Bleed | (h) | characterization |
| 5 | Chol-CTNNB1 | 11 | 5 | IV | 9 | Weekly | 24 | General |
| | | | | | | | | experimental |
| | | | | | | | | (Example 2) |
| 8 | Chol-CTNNB1 | 11 | 5 | SC | 9 | Weekly | 24 | General |
| | | | | | | | | experimental |
| | | | | | | | | (Example 2) |
| 11 | Vehicle | 11 | | IV | 9 | Weekly | 24 | |

| | |
|---|---|
| Total # of Animals: | 33 |

[0936] Since earlier studies demonstrated that it was possible for a single dose of chol-siRNA to generate knockdown in normal liver, it was hypothesized that knockdown could be achieved in orthotopic liver tumors as well. Mice were inoculated with intrahepatic Hep3B tumors that were allowed to grow for one week post-inoculation, and then these mice were administered 5 mg/kg doses of chol-CTNNB1 (either i.v. or s.c.) three times a week for three weeks (9 total doses). As illustrated in FIG. 48, the chol-CTNNB1 dosed s.c. was able to produce >50% mRNA knockdown at the harvest time point of 24 h post-final dose. In contrast, the chol-CTNNB1 siRNA that was dosed i.v. does not seem to show any mRNA knockdown at this time point (although some mice did not have any measurable human CTNNB1 signal, it was hard to determine if the loss of signal was related to knockdown or low tumor burden). The human Hep3B cells are also known to secrete human alpha-Fetoprotein (AFP), and it is known that the amount of secreted AFP correlates with the number of Hep3B cells. Thus, the concentration of AFP in serum is taken as a marker of tumor load in the mouse, and the increase in AFP over time correlates with tumor growth. As illustrated in FIG. 49, the chol-CTNNB1 dosed s.c. markedly reduced the AFP levels in those mice, which provides evidence that the CTNNB1 mRNA knockdown led to the inhibition of tumor growth.

### Example 46. Liver PK/PD Study

[0937] Female wild-type CD-1 mice will be dosed with chol-siRNA-EEP conjugates at 5 mg/kg (based on the weight of siRNA). In these studies the siRNA used will be against the mouse Factor VII (FVII) such that FVII knockdown can be determined by measuring the FVII protein levels in plasma. Multiple EEPs (endosomolytic moieties) will be used to determine the peptide sequence that demonstrates optimal endosomal escape, resulting in the best knockdown of the FVII target gene relative to the control.

### Example 47. Tumor PK/PD Study

[0938] Female NCr nu/nu mice bearing subcutaneous flank H358 tumors will be dosed with EGFR antibody-siRNA-EEP conjugates at 0.5 mg/kg (based on siRNA). Multiple EEPs (endosomolytic moieties) will be used to determine the peptide sequence that demonstrates optimal endosomal escape, resulting in the best knockdown of the target gene relative to the control.

### Example 48. Formulation of an ABC Conjugate with Nanoparticles

[0939] An exemplary ABC conjugate is packaged into self-assembled nanoparticles using cyclodextrin polymers (10 kDa) and an excess of non-conjugated siRNAs (ED 40-60 nm, PDI 0.1-0.2). In these particles, the exemplary ABC conjugate maintains its ability to interact with the antibody target. The stability and target binding competency of the particles in circulation in vivo is regulated through modifications of the packaging siRNAs.

### Nanoparticle Formation

[0940] Nanoparticles are prepared at a final siRNA concentration of 1.6 mg/mL. siRNA containing CY5-siRNA at a ratio of 1:20 is first diluted to 2× final concentration in water. Cyclodextrin polymer (CDP) is diluted to 2× final concentration necessary to achieve a nitrogen to phosphorus ratio (N:P) of 3:1 in 10 mM phosphate buffer at neutral pH. CDP is added quickly to siRNA and is further mixed by pipetting. Particles are incubated for at least 15 minutes before dosing or analysis.

### In Vitro EGFR Binding

[0941] Nanoparticles containing various amount of the exemplary ABC conjugate are diluted into Fetal calf serum to a final concentration of 10 nM and are incubated for 1 h at RT with Protein G Dynabeads (Thermofisher) loaded with 150 nM of a purified EGFR-Fc protein (Sino Biological). Beads are washed twice with PBS containing 0.01% Tween 20 and 0.05% BSA before bead-bound nanoparticles are disrupted with water containing 0.01% Tween 20 and 100 μg/ml heparin. The amount of CY5-siRNA contained in the input, unbound fraction, washes and bead eluate is quantified by fluorescence using a TECAN Infinite M200 Pro (Excitation 635 nm; Emission 675 nm).

### CY5-ASC Plasma Quantification

[0942] Quantification of nanoparticles in mouse plasma is performed as illustrated in Example 43. The CY5-siRNAs bound to EGFR beads are released by using heparin to compete the electrostatic interactions between CDP and siRNAs.

[0943] While preferred embodiments of the present disclosure have been shown and described herein, it will be obvious to those skilled in the art that such embodiments are provided by way of example only. Numerous variations, changes, and substitutions will now occur to those skilled in the art without departing from the disclosure. It should be understood that various alternatives to the embodiments of the disclosure described herein may be employed in practicing the disclosure. It is intended that the following claims define the scope of the disclosure and that methods and structures within the scope of these claims and their equivalents be covered thereby.

The application's sequence listing, which the Patent Office published only in electronic form, follows.

SEQUENCE LISTING (2117 sequences)

SEQ ID NO: 1 - RNA, 23 nt, Homo sapiens
  source 1..23: mol_type = unassigned RNA
aaatgactgaatataaacttgtg

SEQ ID NO: 2 - RNA, 23 nt, Homo sapiens
  source 1..23: mol_type = unassigned RNA
aatgactgaatataaacttgtgg

SEQ ID NO: 3 - RNA, 23 nt, Homo sapiens
  source 1..23: mol_type = unassigned RNA
aacttgtggtagttggagctggt

SEQ ID NO: 4 - RNA, 23 nt, Homo sapiens
  source 1..23: mol_type = unassigned RNA
taggcaagagtgccttgacgata

SEQ ID NO: 5 - RNA, 23 nt, Homo sapiens
  source 1..23: mol_type = unassigned RNA
ggcaagagtgccttgacgataca

SEQ ID NO: 6 - RNA, 23 nt, Homo sapiens
  source 1..23: mol_type = unassigned RNA
gcaagagtgccttgacgatacag

SEQ ID NO: 7 - RNA, 23 nt, Homo sapiens
  source 1..23: mol_type = unassigned RNA
caagagtgccttgacgatacagc

SEQ ID NO: 8 - RNA, 23 nt, Homo sapiens
  source 1..23: mol_type = unassigned RNA
agtgccttgacgatacagctaat

SEQ ID NO: 9 - RNA, 23 nt, Homo sapiens
  source 1..23: mol_type = unassigned RNA
gtgccttgacgatacagctaatt

SEQ ID NO: 10 - RNA, 23 nt, Homo sapiens
  source 1..23: mol_type = unassigned RNA
ccttgacgatacagctaattcag

SEQ ID NO: 11 - RNA, 23 nt, Homo sapiens
  source 1..23: mol_type = unassigned RNA
cttgacgatacagctaattcaga

SEQ ID NO: 12 - RNA, 23 nt, Homo sapiens
  source 1..23: mol_type = unassigned RNA
tacagctaattcagaatcatttt

SEQ ID NO: 13 - RNA, 23 nt, Homo sapiens
  source 1..23: mol_type = unassigned RNA
ttgtggacgaatatgatccaaca

SEQ ID NO: 14 - RNA, 23 nt, Homo sapiens
  source 1..23: mol_type = unassigned RNA
tggacgaatatgatccaacaata

SEQ ID NO: 15 - RNA, 23 nt, Homo sapiens
  source 1..23: mol_type = unassigned RNA
ggacgaatatgatccaacaatag

SEQ ID NO: 16 - DNA, 21 bp, synthetic construct
  misc_feature 1..21: note = Description of Artificial Sequence: Synthetic oligonucleotide
  source 1..21: mol_type = other DNA
  misc_feature 1..19: note = RNA
  misc_feature 20..21: note = DNA
atgactgaatataaacttgtt

SEQ ID NO: 17 - DNA, 21 bp, synthetic construct
  misc_feature 1..21: note = Description of Artificial Sequence: Synthetic oligonucleotide
  source 1..21: mol_type = other DNA
  misc_feature 1..19: note = RNA
  misc_feature 20..21: note = DNA
caagtttatattcagtcattt

SEQ ID NO: 18 - DNA, 21 bp, synthetic construct
  misc_feature 1..21: note = Description of Artificial Sequence: Synthetic oligonucleotide
  source 1..21: mol_type = other DNA
  misc_feature 1..19: note = RNA
  misc_feature 20..21: note = DNA
tgactgaatataaacttgttt

SEQ ID NO: 19 - DNA, 21 bp, synthetic construct
  misc_feature 1..21: note = Description of Artificial Sequence: Synthetic oligonucleotide
  source 1..21: mol_type = other DNA
  misc_feature 1..19: note = RNA
  misc_feature 20..21: note = DNA
acaagtttatattcagtcatt

SEQ ID NO: 20 - DNA, 21 bp, synthetic construct
  misc_feature 1..21: note = Description of Artificial Sequence: Synthetic oligonucleotide
  source 1..21: mol_type = other DNA
  misc_feature 1..19: note = RNA
  misc_feature 20..21: note = DNA
cttgtggtagttggagctgtt

SEQ ID NO: 21 - DNA, 21 bp, synthetic construct
  misc_feature 1..21: note = Description of Artificial Sequence: Synthetic oligonucleotide
  source 1..21: mol_type = other DNA
  misc_feature 1..19: note = RNA
  misc_feature 20..21: note = DNA
cagctccaactaccacaagtt

SEQ ID NO: 22 - DNA, 21 bp, synthetic construct
  misc_feature 1..21: note = Description of Artificial Sequence: Synthetic oligonucleotide
  source 1..21: mol_type = other DNA
  misc_feature 1..19: note = RNA
  misc_feature 20..21: note = DNA
ggcaagagtgccttgacgatt

SEQ ID NO: 23 - DNA, 21 bp, synthetic construct
  misc_feature 1..21: note = Description of Artificial Sequence: Synthetic oligonucleotide
  source 1..21: mol_type = other DNA
  misc_feature 1..19: note = RNA
  misc_feature 20..21: note = DNA
tcgtcaaggcactcttgcctt

SEQ ID NO: 24 - DNA, 21 bp, synthetic construct
  misc_feature 1..21: note = Description of Artificial Sequence: Synthetic oligonucleotide
  source 1..21: mol_type = other DNA
  misc_feature 1..19: note = RNA
  misc_feature 20..21: note = DNA
caagagtgccttgacgatatt

SEQ ID NO: 25 - DNA, 21 bp, synthetic construct
  misc_feature 1..21: note = Description of Artificial Sequence: Synthetic oligonucleotide
  source 1..21: mol_type = other DNA
  misc_feature 1..19: note = RNA
  misc_feature 20..21: note = DNA
tatcgtcaaggcactcttgtt

SEQ ID NO: 26 - DNA, 21 bp, synthetic construct
  misc_feature 1..21: note = Description of Artificial Sequence: Synthetic oligonucleotide
  source 1..21: mol_type = other DNA
  misc_feature 1..19: note = RNA
  misc_feature 20..21: note = DNA
aagagtgccttgacgatactt

SEQ ID NO: 27 - DNA, 21 bp, synthetic construct
  misc_feature 1..21: note = Description of Artificial Sequence: Synthetic oligonucleotide
  source 1..21: mol_type = other DNA
  misc_feature 1..19: note = RNA
  misc_feature 20..21: note = DNA
gtatcgtcaaggcactctttt

SEQ ID NO: 28 - DNA, 21 bp, synthetic construct
  misc_feature 1..21: note = Description of Artificial Sequence: Synthetic oligonucleotide
  source 1..21: mol_type = other DNA
  misc_feature 1..19: note = RNA
  misc_feature 20..21: note = DNA
agagtgccttgacgatacatt

SEQ ID NO: 29 - DNA, 21 bp, synthetic construct
  misc_feature 1..21: note = Description of Artificial Sequence: Synthetic oligonucleotide
  source 1..21: mol_type = other DNA
  misc_feature 1..19: note = RNA
  misc_feature 20..21: note = DNA
tgtatcgtcaaggcactcttt

SEQ ID NO: 30 - DNA, 21 bp, synthetic construct
  misc_feature 1..21: note = Description of Artificial Sequence: Synthetic oligonucleotide
  source 1..21: mol_type = other DNA
  misc_feature 1..19: note = RNA
  misc_feature 20..21: note = DNA
tgccttgacgatacagctatt

SEQ ID NO: 31 - DNA, 21 bp, synthetic construct
  misc_feature 1..21: note = Description of Artificial Sequence: Synthetic oligonucleotide
  source 1..21: mol_type = other DNA
  misc_feature 1..19: note = RNA
  misc_feature 20..21: note = DNA
tagctgtatcgtcaaggcatt

SEQ ID NO: 32 - DNA, 21 bp, synthetic construct
  misc_feature 1..21: note = Description of Artificial Sequence: Synthetic oligonucleotide
  source 1..21: mol_type = other DNA
  misc_feature 1..19: note = RNA
  misc_feature 20..21: note = DNA
gccttgacgatacagctaatt

SEQ ID NO: 33 - DNA, 21 bp, synthetic construct
  misc_feature 1..21: note = Description of Artificial Sequence: Synthetic oligonucleotide
  source 1..21: mol_type = other DNA
  misc_feature 1..19: note = RNA
  misc_feature 20..21: note = DNA
ttagctgtatcgtcaaggctt

SEQ ID NO: 34 - DNA, 21 bp, synthetic construct
  misc_feature 1..21: note = Description of Artificial Sequence: Synthetic oligonucleotide
  source 1..21: mol_type = other DNA
  misc_feature 1..19: note = RNA
  misc_feature 20..21: note = DNA
ttgacgatacagctaattctt

SEQ ID NO: 35 - DNA, 21 bp, synthetic construct
  misc_feature 1..21: note = Description of Artificial Sequence: Synthetic oligonucleotide
  source 1..21: mol_type = other DNA
  misc_feature 1..19: note = RNA
  misc_feature 20..21: note = DNA
gaattagctgtatcgtcaatt

SEQ ID NO: 36 - DNA, 21 bp, synthetic construct
  misc_feature 1..21: note = Description of Artificial Sequence: Synthetic oligonucleotide
  source 1..21: mol_type = other DNA
  misc_feature 1..19: note = RNA
  misc_feature 20..21: note = DNA
tgacgatacagctaattcatt

SEQ ID NO: 37 - DNA, 21 bp, synthetic construct
  misc_feature 1..21: note = Description of Artificial Sequence: Synthetic oligonucleotide
  source 1..21: mol_type = other DNA
  misc_feature 1..19: note = RNA
  misc_feature 20..21: note = DNA
tgaattagctgtatcgtcatt

SEQ ID NO: 38 - DNA, 21 bp, synthetic construct
  misc_feature 1..21: note = Description of Artificial Sequence: Synthetic oligonucleotide
  source 1..21: mol_type = other DNA
  misc_feature 1..19: note = RNA
  misc_feature 20..21: note = DNA
cagctaattcagaatcatttt

SEQ ID NO: 39 - DNA, 21 bp, synthetic construct
  misc_feature 1..21: note = Description of Artificial Sequence: Synthetic oligonucleotide
  source 1..21: mol_type = other DNA
  misc_feature 1..19: note = RNA
  misc_feature 20..21: note = DNA
aatgattctgaattagctgtt

SEQ ID NO: 40 - DNA, 21 bp, synthetic construct
  misc_feature 1..21: note = Description of Artificial Sequence: Synthetic oligonucleotide
  source 1..21: mol_type = other DNA
  misc_feature 1..19: note = RNA
  misc_feature 20..21: note = DNA
gtggacgaatatgatccaatt

SEQ ID NO: 41 - DNA, 21 bp, synthetic construct
  misc_feature 1..21: note = Description of Artificial Sequence: Synthetic oligonucleotide
  source 1..21: mol_type = other DNA
  misc_feature 1..19: note = RNA
  misc_feature 20..21: note = DNA
ttggatcatattcgtccactt

SEQ ID NO: 42 - DNA, 21 bp, synthetic construct
  misc_feature 1..21: note = Description of Artificial Sequence: Synthetic oligonucleotide
  source 1..21: mol_type = other DNA
  misc_feature 1..19: note = RNA
  misc_feature 20..21: note = DNA
gacgaatatgatccaacaatt

SEQ ID NO: 43 - DNA, 21 bp, synthetic construct
  misc_feature 1..21: note = Description of Artificial Sequence: Synthetic oligonucleotide
  source 1..21: mol_type = other DNA
  misc_feature 1..19: note = RNA
  misc_feature 20..21: note = DNA
ttgttggatcatattcgtctt

SEQ ID NO: 44 - DNA, 21 bp, synthetic construct
  misc_feature 1..21: note = Description of Artificial Sequence: Synthetic oligonucleotide
  source 1..21: mol_type = other DNA
  misc_feature 1..19: note = RNA
  misc_feature 20..21: note = DNA
acgaatatgatccaacaattt

SEQ ID NO: 45 - DNA, 21 bp, synthetic construct
  misc_feature 1..21: note = Description of Artificial Sequence: Synthetic oligonucleotide
  source 1..21: mol_type = other DNA
  misc_feature 1..19: note = RNA
  misc_feature 20..21: note = DNA
attgttggatcatattcgttt

SEQ ID NO: 46 - DNA, 21 bp, synthetic construct
  misc_feature 1..21: note = Description of Artificial Sequence: Synthetic oligonucleotide
  source 1..21: mol_type = other DNA
  modified_base 1: mod_base = OTHER; note = 2'-O-Methyl nucleotide
  modified_base 2: mod_base = OTHER; note = 2'-O-Methyl nucleotide
  modified_base 3: mod_base = OTHER; note = 2'-fluoro nucleotide
  modified_base 4: mod_base = OTHER; note = 2'-O-Methyl nucleotide
  modified_base 5: mod_base = OTHER; note = 2'-fluoro nucleotide
  modified_base 6: mod_base = OTHER; note = 2'-O-Methyl nucleotide
  modified_base 7: mod_base = OTHER; note = 2'-fluoro nucleotide
  modified_base 8: mod_base = OTHER; note = 2'-O-Methyl nucleotide
  modified_base 9: mod_base = OTHER; note = 2'-fluoro nucleotide
  modified_base 10: mod_base = OTHER; note = 2'-O-Methyl nucleotide
  modified_base 11: mod_base = OTHER; note = 2'-fluoro nucleotide
  modified_base 12: mod_base = OTHER; note = 2'-O-Methyl nucleotide
  modified_base 13: mod_base = OTHER; note = 2'-fluoro nucleotide
  modified_base 14: mod_base = OTHER; note = 2'-O-Methyl nucleotide
  modified_base 15: mod_base = OTHER; note = 2'-fluoro nucleotide
  modified_base 16: mod_base = OTHER; note = 2'-O-Methyl nucleotide
  modified_base 17: mod_base = OTHER; note = 2'-fluoro nucleotide
  modified_base 18: mod_base = OTHER; note = 2'-O-Methyl nucleotide
  modified_base 19: mod_base = OTHER; note = 2'-fluoro nucleotide
  modified_base 20: mod_base = OTHER; note = deoxy-thymine phosphorothioate
  misc_feature 1..19: note = RNA
  misc_feature 20..21: note = DNA
atgactgaatataaacttgtt

SEQ ID NO: 47 - DNA, 21 bp, synthetic construct
  misc_feature 1..21: note = Description of Artificial Sequence: Synthetic oligonucleotide
  source 1..21: mol_type = other DNA
  modified_base 1: mod_base = OTHER; note = 2'-fluoro nucleotide
  modified_base 2: mod_base = OTHER; note = 2'-fluoro nucleotide
  modified_base 3: mod_base = OTHER; note = 2'-O-Methyl nucleotide
  modified_base 4: mod_base = OTHER; note = 2'-fluoro nucleotide
  modified_base 5: mod_base = OTHER; note = 2'-O-Methyl nucleotide
  modified_base 6: mod_base = OTHER; note = 2'-fluoro nucleotide
  modified_base 7: mod_base = OTHER; note = 2'-O-Methyl nucleotide
  modified_base 8: mod_base = OTHER; note = 2'-fluoro nucleotide
  modified_base 9: mod_base = OTHER; note = 2'-O-Methyl nucleotide
  modified_base 10: mod_base = OTHER; note = 2'-fluoro nucleotide
  modified_base 11: mod_base = OTHER; note = 2'-O-Methyl nucleotide
  modified_base 12: mod_base = OTHER; note = 2'-fluoro nucleotide
  modified_base 13: mod_base = OTHER; note = 2'-O-Methyl nucleotide
  modified_base 14: mod_base = OTHER; note = 2'-fluoro nucleotide
  modified_base 15: mod_base = OTHER; note = 2'-O-Methyl nucleotide
  modified_base 16: mod_base = OTHER; note = 2'-fluoro nucleotide
  modified_base 17: mod_base = OTHER; note = 2'-O-Methyl nucleotide
  modified_base 18: mod_base = OTHER; note = 2'-fluoro nucleotide
  modified_base 19: mod_base = OTHER; note = 2'-O-Methyl nucleotide
  modified_base 20: mod_base = OTHER; note = deoxy-thymine phosphorothioate
  misc_feature 1..19: note = RNA
  misc_feature 20..21: note = DNA
caagtttatattcagtcattt

SEQ ID NO: 48 - DNA, 21 bp, synthetic construct
  misc_feature 1..21: note = Description of Artificial Sequence: Synthetic oligonucleotide
  source 1..21: mol_type = other DNA
  modified_base 1: mod_base = OTHER; note = 2'-O-Methyl nucleotide
  modified_base 2: mod_base = OTHER; note = 2'-O-Methyl nucleotide
  modified_base 3: mod_base = OTHER; note = 2'-fluoro nucleotide
  modified_base 4: mod_base = OTHER; note = 2'-O-Methyl nucleotide
  modified_base 5: mod_base = OTHER; note = 2'-fluoro nucleotide
  modified_base 6: mod_base = OTHER; note = 2'-O-Methyl nucleotide
  modified_base 7: mod_base = OTHER; note = 2'-fluoro nucleotide
  modified_base 8: mod_base = OTHER; note = 2'-O-Methyl nucleotide
  modified_base 9: mod_base = OTHER; note = 2'-fluoro nucleotide
  modified_base 10: mod_base = OTHER; note = 2'-O-Methyl nucleotide
  modified_base 11: mod_base = OTHER; note = 2'-fluoro nucleotide
  modified_base 12: mod_base = OTHER; note = 2'-O-Methyl nucleotide
  modified_base 13: mod_base = OTHER; note = 2'-fluoro nucleotide
  modified_base 14: mod_base = OTHER; note = 2'-O-Methyl nucleotide
  modified_base 15: mod_base = OTHER; note = 2'-fluoro nucleotide
  modified_base 16: mod_base = OTHER; note = 2'-O-Methyl nucleotide
  modified_base 17: mod_base = OTHER; note = 2'-fluoro nucleotide
  modified_base 18: mod_base = OTHER; note = 2'-O-Methyl nucleotide
  modified_base 19: mod_base = OTHER; note = 2'-fluoro nucleotide
  modified_base 20: mod_base = OTHER; note = deoxy-thymine phosphorothioate
  misc_feature 1..19: note = RNA
  misc_feature 20..21: note = DNA
tgactgaatataaacttgttt

SEQ ID NO: 49 - DNA, 21 bp, synthetic construct
  misc_feature 1..21: note = Description of Artificial Sequence: Synthetic oligonucleotide
  source 1..21: mol_type = other DNA
  modified_base 1: mod_base = OTHER; note = 2'-fluoro nucleotide
  modified_base 2: mod_base = OTHER; note = 2'-fluoro nucleotide
  modified_base 3: mod_base = OTHER; note = 2'-O-Methyl nucleotide
  modified_base 4: mod_base = OTHER; note = 2'-fluoro nucleotide
  modified_base 5: mod_base = OTHER; note = 2'-O-Methyl nucleotide
  modified_base 6: mod_base = OTHER; note = 2'-fluoro nucleotide
  modified_base 7: mod_base = OTHER; note = 2'-O-Methyl nucleotide
  modified_base 8: mod_base = OTHER; note = 2'-fluoro nucleotide
  modified_base 9: mod_base = OTHER; note = 2'-O-Methyl nucleotide
  modified_base 10: mod_base = OTHER; note = 2'-fluoro nucleotide
  modified_base 11: mod_base = OTHER; note = 2'-O-Methyl nucleotide
  modified_base 12: mod_base = OTHER; note = 2'-fluoro nucleotide
  modified_base 13: mod_base = OTHER; note = 2'-O-Methyl nucleotide
  modified_base 14: mod_base = OTHER; note = 2'-fluoro nucleotide
  modified_base 15: mod_base = OTHER; note = 2'-O-Methyl nucleotide
  modified_base 16: mod_base = OTHER; note = 2'-fluoro nucleotide
  modified_base 17: mod_base = OTHER; note = 2'-O-Methyl nucleotide
  modified_base 18: mod_base = OTHER; note = 2'-fluoro nucleotide
  modified_base 19: mod_base = OTHER; note = 2'-O-Methyl nucleotide
  modified_base 20: mod_base = OTHER; note = deoxy-thymine phosphorothioate
  misc_feature 1..19: note = RNA
  misc_feature 20..21: note = DNA
acaagtttatattcagtcatt

SEQ ID NO: 50 - DNA, 21 bp, synthetic construct
  misc_feature 1..21: note = Description of Artificial Sequence: Synthetic oligonucleotide
  source 1..21: mol_type = other DNA
  modified_base 1: mod_base = OTHER; note = 2'-O-Methyl nucleotide
  modified_base 2: mod_base = OTHER; note = 2'-O-Methyl nucleotide
  modified_base 3: mod_base = OTHER; note = 2'-fluoro nucleotide
  modified_base 4: mod_base = OTHER; note = 2'-O-Methyl nucleotide
  modified_base 5: mod_base = OTHER; note = 2'-fluoro nucleotide
  modified_base 6: mod_base = OTHER; note = 2'-O-Methyl nucleotide
  modified_base 7: mod_base = OTHER; note = 2'-fluoro nucleotide
  modified_base 8: mod_base = OTHER; note = 2'-O-Methyl nucleotide
  modified_base 9: mod_base = OTHER; note = 2'-fluoro nucleotide
  modified_base 10: mod_base = OTHER; note = 2'-O-Methyl nucleotide
  modified_base 11: mod_base = OTHER; note = 2'-fluoro nucleotide
  modified_base 12: mod_base = OTHER; note = 2'-O-Methyl nucleotide
  modified_base 13: mod_base = OTHER; note = 2'-fluoro nucleotide
  modified_base 14: mod_base = OTHER; note = 2'-O-Methyl nucleotide
  modified_base 15: mod_base = OTHER; note = 2'-fluoro nucleotide
  modified_base 16: mod_base = OTHER; note = 2'-O-Methyl nucleotide
  modified_base 17: mod_base = OTHER; note = 2'-fluoro nucleotide
  modified_base 18: mod_base = OTHER; note = 2'-O-Methyl nucleotide
  modified_base 19: mod_base = OTHER; note = 2'-fluoro nucleotide
  modified_base 20: mod_base = OTHER; note = deoxy-thymine phosphorothioate
  misc_feature 1..19: note = RNA
  misc_feature 20..21: note = DNA
cttgtggtagttggagctgtt

SEQ ID NO: 51 - DNA, 21 bp, synthetic construct
  misc_feature 1..21: note = Description of Artificial Sequence: Synthetic oligonucleotide
  source 1..21: mol_type = other DNA
  modified_base 1: mod_base = OTHER; note = 2'-fluoro nucleotide
  modified_base 2: mod_base = OTHER; note = 2'-fluoro nucleotide
  modified_base 3: mod_base = OTHER; note = 2'-O-Methyl nucleotide
  modified_base 4: mod_base = OTHER; note = 2'-fluoro nucleotide
  modified_base 5: mod_base = OTHER; note = 2'-O-Methyl nucleotide
  modified_base 6: mod_base = OTHER; note = 2'-fluoro nucleotide
  modified_base 7: mod_base = OTHER; note = 2'-O-Methyl nucleotide
  modified_base 8: mod_base = OTHER; note = 2'-fluoro nucleotide
  modified_base 9: mod_base = OTHER; note = 2'-O-Methyl nucleotide
  modified_base 10: mod_base = OTHER; note = 2'-fluoro nucleotide
  modified_base 11: mod_base = OTHER; note = 2'-O-Methyl nucleotide
  modified_base 12: mod_base = OTHER; note = 2'-fluoro nucleotide
  modified_base 13: mod_base = OTHER; note = 2'-O-Methyl nucleotide
  modified_base 14: mod_base = OTHER; note = 2'-fluoro nucleotide
  modified_base 15: mod_base = OTHER; note = 2'-O-Methyl nucleotide
  modified_base 16: mod_base = OTHER; note = 2'-fluoro nucleotide
  modified_base 17: mod_base = OTHER; note = 2'-O-Methyl nucleotide
  modified_base 18: mod_base = OTHER; note = 2'-fluoro nucleotide
  modified_base 19: mod_base = OTHER; note = 2'-O-Methyl nucleotide
  modified_base 20: mod_base = OTHER; note = deoxy-thymine phosphorothioate
  misc_feature 1..19: note = RNA
  misc_feature 20..21: note = DNA
cagctccaactaccacaagtt

SEQ ID NO: 52 - DNA, 21 bp, synthetic construct
  misc_feature 1..21: note = Description of Artificial Sequence: Synthetic oligonucleotide
  source 1..21: mol_type = other DNA
  modified_base 1: mod_base = OTHER; note = 2'-O-Methyl nucleotide
  modified_base 2: mod_base = OTHER; note = 2'-O-Methyl nucleotide
  modified_base 3: mod_base = OTHER; note = 2'-fluoro nucleotide
  modified_base 4: mod_base = OTHER; note = 2'-O-Methyl nucleotide
  modified_base 5: mod_base = OTHER; note = 2'-fluoro nucleotide
  modified_base 6: mod_base = OTHER; note = 2'-O-Methyl nucleotide
  modified_base 7: mod_base = OTHER; note = 2'-fluoro nucleotide
  modified_base 8: mod_base = OTHER; note = 2'-O-Methyl nucleotide
  modified_base 9: mod_base = OTHER; note = 2'-fluoro nucleotide
  modified_base 10: mod_base = OTHER; note = 2'-O-Methyl nucleotide
  modified_base 11: mod_base = OTHER; note = 2'-fluoro nucleotide
  modified_base 12: mod_base = OTHER; note = 2'-O-Methyl nucleotide
  modified_base 13: mod_base = OTHER; note = 2'-fluoro nucleotide
  modified_base 14: mod_base = OTHER; note = 2'-O-Methyl nucleotide
  modified_base 15: mod_base = OTHER; note = 2'-fluoro nucleotide
  modified_base 16: mod_base = OTHER; note = 2'-O-Methyl nucleotide
  modified_base 17: mod_base = OTHER; note = 2'-fluoro nucleotide
  modified_base 18: mod_base = OTHER; note = 2'-O-Methyl nucleotide
  modified_base 19: mod_base = OTHER; note = 2'-fluoro nucleotide
  modified_base 20: mod_base = OTHER; note = deoxy-thymine phosphorothioate
  misc_feature 1..19: note = RNA
  misc_feature 20..21: note = DNA
ggcaagagtgccttgacgatt

SEQ ID NO: 53 - DNA, 21 bp, synthetic construct
  misc_feature 1..21: note = Description of Artificial Sequence: Synthetic oligonucleotide
  source 1..21: mol_type = other DNA
  modified_base 1: mod_base = OTHER; note = 2'-fluoro nucleotide
  modified_base 2: mod_base = OTHER; note = 2'-fluoro nucleotide
  modified_base 3: mod_base = OTHER; note = 2'-O-Methyl nucleotide
  modified_base 4: mod_base = OTHER; note = 2'-fluoro nucleotide
  modified_base 5: mod_base = OTHER; note = 2'-O-Methyl nucleotide
  modified_base 6: mod_base = OTHER; note = 2'-fluoro nucleotide
  modified_base 7: mod_base = OTHER; note = 2'-O-Methyl nucleotide
  modified_base 8: mod_base = OTHER; note = 2'-fluoro nucleotide
  modified_base 9: mod_base = OTHER; note = 2'-O-Methyl nucleotide
  modified_base 10: mod_base = OTHER; note = 2'-fluoro nucleotide
  modified_base 11: mod_base = OTHER; note = 2'-O-Methyl nucleotide
  modified_base 12: mod_base = OTHER; note = 2'-fluoro nucleotide
  modified_base 13: mod_base = OTHER; note = 2'-O-Methyl nucleotide
  modified_base 14: mod_base = OTHER; note = 2'-fluoro nucleotide
  modified_base 15: mod_base = OTHER; note = 2'-O-Methyl nucleotide
  modified_base 16: mod_base = OTHER; note = 2'-fluoro nucleotide
  modified_base 17: mod_base = OTHER; note = 2'-O-Methyl nucleotide
  modified_base 18: mod_base = OTHER; note = 2'-fluoro nucleotide
  modified_base 19: mod_base = OTHER; note = 2'-O-Methyl nucleotide
  modified_base 20: mod_base = OTHER; note = deoxy-thymine phosphorothioate
  misc_feature 1..19: note = RNA
  misc_feature 20..21: note = DNA
tcgtcaaggcactcttgcctt

SEQ ID NO: 54 - DNA, 21 bp, synthetic construct
  misc_feature 1..21: note = Description of Artificial Sequence: Synthetic oligonucleotide
  source 1..21: mol_type = other DNA
  modified_base 1: mod_base = OTHER; note = 2'-O-Methyl nucleotide
  modified_base 2: mod_base = OTHER; note = 2'-O-Methyl nucleotide
  modified_base 3: mod_base = OTHER; note = 2'-fluoro nucleotide
  modified_base 4: mod_base = OTHER; note = 2'-O-Methyl nucleotide
  modified_base 5: mod_base = OTHER; note = 2'-fluoro nucleotide
  modified_base 6: mod_base = OTHER; note = 2'-O-Methyl nucleotide
  modified_base 7: mod_base = OTHER; note = 2'-fluoro nucleotide
  modified_base 8: mod_base = OTHER; note = 2'-O-Methyl nucleotide
  modified_base 9: mod_base = OTHER; note = 2'-fluoro nucleotide
  modified_base 10: mod_base = OTHER; note = 2'-O-Methyl nucleotide
  modified_base 11: mod_base = OTHER; note = 2'-fluoro nucleotide
  modified_base 12: mod_base = OTHER; note = 2'-O-Methyl nucleotide
  modified_base 13: mod_base = OTHER; note = 2'-fluoro nucleotide
  modified_base 14: mod_base = OTHER; note = 2'-O-Methyl nucleotide
  modified_base 15: mod_base = OTHER; note = 2'-fluoro nucleotide
  modified_base 16: mod_base = OTHER; note = 2'-O-Methyl nucleotide
  modified_base 17: mod_base = OTHER; note = 2'-fluoro nucleotide
  modified_base 18: mod_base = OTHER; note = 2'-O-Methyl nucleotide
  modified_base 19: mod_base = OTHER; note = 2'-fluoro nucleotide
  modified_base 20: mod_base = OTHER; note = deoxy-thymine phosphorothioate
  misc_feature 1..19: note = RNA
  misc_feature 20..21: note = DNA
caagagtgccttgacgatatt

SEQ ID NO: 55 - DNA, 21 bp, synthetic construct
  misc_feature 1..21: note = Description of Artificial Sequence: Synthetic oligonucleotide
  source 1..21: mol_type = other DNA
  modified_base 1: mod_base = OTHER; note = 2'-fluoro nucleotide
  modified_base 2: mod_base = OTHER; note = 2'-fluoro nucleotide
  modified_base 3: mod_base = OTHER; note = 2'-O-Methyl nucleotide
  modified_base 4: mod_base = OTHER; note = 2'-fluoro nucleotide
  modified_base 5: mod_base = OTHER; note = 2'-O-Methyl nucleotide
  modified_base 6: mod_base = OTHER; note = 2'-fluoro nucleotide
  modified_base 7: mod_base = OTHER; note = 2'-O-Methyl nucleotide
  modified_base 8: mod_base = OTHER; note = 2'-fluoro nucleotide
  modified_base 9: mod_base = OTHER; note = 2'-O-Methyl nucleotide
  modified_base 10: mod_base = OTHER; note = 2'-fluoro nucleotide
  modified_base 11: mod_base = OTHER; note = 2'-O-Methyl nucleotide
  modified_base 12: mod_base = OTHER; note = 2'-fluoro nucleotide
  modified_base 13: mod_base = OTHER; note = 2'-O-Methyl nucleotide
  modified_base 14: mod_base = OTHER; note = 2'-fluoro nucleotide
  modified_base 15: mod_base = OTHER; note = 2'-O-Methyl nucleotide
  modified_base 16: mod_base = OTHER; note = 2'-fluoro nucleotide
  modified_base 17: mod_base = OTHER; note = 2'-O-Methyl nucleotide
  modified_base 18: mod_base = OTHER; note = 2'-fluoro nucleotide
  modified_base 19: mod_base = OTHER; note = 2'-O-Methyl nucleotide
  modified_base 20: mod_base = OTHER; note = deoxy-thymine phosphorothioate
  misc_feature 1..19: note = RNA
  misc_feature 20..21: note = DNA
tatcgtcaaggcactcttgtt

SEQ ID NO: 56 - DNA, 21 bp, synthetic construct
  misc_feature 1..21: note = Description of Artificial Sequence: Synthetic oligonucleotide
  source 1..21: mol_type = other DNA
  modified_base 1: mod_base = OTHER; note = 2'-O-Methyl nucleotide
  modified_base 2: mod_base = OTHER; note = 2'-O-Methyl nucleotide
  modified_base 3: mod_base = OTHER; note = 2'-fluoro nucleotide
  modified_base 4: mod_base = OTHER; note = 2'-O-Methyl nucleotide
  modified_base 5: mod_base = OTHER; note = 2'-fluoro nucleotide
  modified_base 6: mod_base = OTHER; note = 2'-O-Methyl nucleotide
  modified_base 7: mod_base = OTHER; note = 2'-fluoro nucleotide
  modified_base 8: mod_base = OTHER; note = 2'-O-Methyl nucleotide
  modified_base 9: mod_base = OTHER; note = 2'-fluoro nucleotide
  modified_base 10: mod_base = OTHER; note = 2'-O-Methyl nucleotide
  modified_base 11: mod_base = OTHER; note = 2'-fluoro nucleotide
  modified_base 12: mod_base = OTHER; note = 2'-O-Methyl nucleotide
  modified_base 13: mod_base = OTHER; note = 2'-fluoro nucleotide
  modified_base 14: mod_base = OTHER; note = 2'-O-Methyl nucleotide
  modified_base 15: mod_base = OTHER; note = 2'-fluoro nucleotide
  modified_base 16: mod_base = OTHER; note = 2'-O-Methyl nucleotide
  modified_base 17: mod_base = OTHER; note = 2'-fluoro nucleotide
  modified_base 18: mod_base = OTHER; note = 2'-O-Methyl nucleotide
  modified_base 19: mod_base = OTHER; note = 2'-fluoro nucleotide
  modified_base 20: mod_base = OTHER; note = deoxy-thymine phosphorothioate
  misc_feature 1..19: note = RNA
  misc_feature 20..21: note = DNA
aagagtgccttgacgatactt

SEQ ID NO: 57 - DNA, 21 bp, synthetic construct
  misc_feature 1..21: note = Description of Artificial Sequence: Synthetic oligonucleotide
  source 1..21: mol_type = other DNA
  modified_base 1: mod_base = OTHER; note = 2'-fluoro nucleotide
  modified_base 2: mod_base = OTHER; note = 2'-fluoro nucleotide
  modified_base 3: mod_base = OTHER; note = 2'-O-Methyl nucleotide
  modified_base 4: mod_base = OTHER; note = 2'-fluoro nucleotide
  modified_base 5: mod_base = OTHER; note = 2'-O-Methyl nucleotide
  modified_base 6: mod_base = OTHER; note = 2'-fluoro nucleotide
  modified_base 7: mod_base = OTHER; note = 2'-O-Methyl nucleotide
  modified_base 8: mod_base = OTHER; note = 2'-fluoro nucleotide
  modified_base 9: mod_base = OTHER; note = 2'-O-Methyl nucleotide
  modified_base 10: mod_base = OTHER; note = 2'-fluoro nucleotide
  modified_base 11: mod_base = OTHER; note = 2'-O-Methyl nucleotide
  modified_base 12: mod_base = OTHER; note = 2'-fluoro nucleotide
  modified_base 13: mod_base = OTHER; note = 2'-O-Methyl nucleotide
  modified_base 14: mod_base = OTHER; note = 2'-fluoro nucleotide
  modified_base 15: mod_base = OTHER; note = 2'-O-Methyl nucleotide
  modified_base 16: mod_base = OTHER; note = 2'-fluoro nucleotide
  modified_base 17: mod_base = OTHER; note = 2'-O-Methyl nucleotide
  modified_base 18: mod_base = OTHER; note = 2'-fluoro nucleotide
  modified_base 19: mod_base = OTHER; note = 2'-O-Methyl nucleotide
  modified_base 20: mod_base = OTHER; note = deoxy-thymine phosphorothioate
  misc_feature 1..19: note = RNA
  misc_feature 20..21: note = DNA
gtatcgtcaaggcactctttt

SEQ ID NO: 58 - DNA, 21 bp, synthetic construct
  misc_feature 1..21: note = Description of Artificial Sequence: Synthetic oligonucleotide
  source 1..21: mol_type = other DNA
  modified_base 1: mod_base = OTHER; note = 2'-O-Methyl nucleotide
  modified_base 2: mod_base = OTHER; note = 2'-O-Methyl nucleotide
  modified_base 3: mod_base = OTHER; note = 2'-fluoro nucleotide
  modified_base 4: mod_base = OTHER; note = 2'-O-Methyl nucleotide
  modified_base 5: mod_base = OTHER; note = 2'-fluoro nucleotide
  modified_base 6: mod_base = OTHER; note = 2'-O-Methyl nucleotide
  modified_base 7: mod_base = OTHER; note = 2'-fluoro nucleotide
  modified_base 8: mod_base = OTHER; note = 2'-O-Methyl nucleotide
  modified_base 9: mod_base = OTHER; note = 2'-fluoro nucleotide
  modified_base 10: mod_base = OTHER; note = 2'-O-Methyl nucleotide
  modified_base 11: mod_base = OTHER; note = 2'-fluoro nucleotide
  modified_base 12: mod_base = OTHER; note = 2'-O-Methyl nucleotide
  modified_base 13: mod_base = OTHER; note = 2'-fluoro nucleotide
  modified_base 14: mod_base = OTHER; note = 2'-O-Methyl nucleotide
  modified_base 15: mod_base = OTHER; note = 2'-fluoro nucleotide
  modified_base 16: mod_base = OTHER; note = 2'-O-Methyl nucleotide
  modified_base 17: mod_base = OTHER; note = 2'-fluoro nucleotide
  modified_base 18: mod_base = OTHER; note = 2'-O-Methyl nucleotide
  modified_base 19: mod_base = OTHER; note = 2'-fluoro nucleotide
  modified_base 20: mod_base = OTHER; note = deoxy-thymine phosphorothioate
  misc_feature 1..19: note = RNA
  misc_feature 20..21: note = DNA
agagtgccttgacgatacatt

SEQ ID NO: 59 - DNA, 21 bp, synthetic construct
  misc_feature 1..21: note = Description of Artificial Sequence: Synthetic oligonucleotide
  source 1..21: mol_type = other DNA
  modified_base 1: mod_base = OTHER; note = 2'-fluoro nucleotide
  modified_base 2: mod_base = OTHER; note = 2'-fluoro nucleotide
  modified_base 3: mod_base = OTHER; note = 2'-O-Methyl nucleotide
  modified_base 4: mod_base = OTHER; note = 2'-fluoro nucleotide
  modified_base 5: mod_base = OTHER; note = 2'-O-Methyl nucleotide
  modified_base 6: mod_base = OTHER; note = 2'-fluoro nucleotide
  modified_base 7: mod_base = OTHER; note = 2'-O-Methyl nucleotide
  modified_base 8: mod_base = OTHER; note = 2'-fluoro nucleotide
  modified_base 9: mod_base = OTHER; note = 2'-O-Methyl nucleotide
  modified_base 10: mod_base = OTHER; note = 2'-fluoro nucleotide
  modified_base 11: mod_base = OTHER; note = 2'-O-Methyl nucleotide
  modified_base 12: mod_base = OTHER; note = 2'-fluoro nucleotide
  modified_base 13: mod_base = OTHER; note = 2'-O-Methyl nucleotide
  modified_base 14: mod_base = OTHER; note = 2'-fluoro nucleotide
  modified_base 15: mod_base = OTHER; note = 2'-O-Methyl nucleotide
  modified_base 16: mod_base = OTHER; note = 2'-fluoro nucleotide
  modified_base 17: mod_base = OTHER; note = 2'-O-Methyl nucleotide
  modified_base 18: mod_base = OTHER; note = 2'-fluoro nucleotide
  modified_base 19: mod_base = OTHER; note = 2'-O-Methyl nucleotide
  modified_base 20: mod_base = OTHER; note = deoxy-thymine phosphorothioate
  misc_feature 1..19: note = RNA
  misc_feature 20..21: note = DNA
tgtatcgtcaaggcactcttt

SEQ ID NO: 60 - DNA, 21 bp, synthetic construct
  misc_feature 1..21: note = Description of Artificial Sequence: Synthetic oligonucleotide
  source 1..21: mol_type = other DNA
  modified_base 1: mod_base = OTHER; note = 2'-O-Methyl nucleotide
  modified_base 2: mod_base = OTHER; note = 2'-O-Methyl nucleotide
  modified_base 3: mod_base = OTHER; note = 2'-fluoro nucleotide
  modified_base 4: mod_base = OTHER; note = 2'-O-Methyl nucleotide
  modified_base 5: mod_base = OTHER; note = 2'-fluoro nucleotide
  modified_base 6: mod_base = OTHER; note = 2'-O-Methyl nucleotide
  modified_base 7: mod_base = OTHER; note = 2'-fluoro nucleotide
  modified_base 8: mod_base = OTHER; note = 2'-O-Methyl nucleotide
  modified_base 9: mod_base = OTHER; note = 2'-fluoro nucleotide
  modified_base 10: mod_base = OTHER; note = 2'-O-Methyl nucleotide
  modified_base 11: mod_base = OTHER; note = 2'-fluoro nucleotide
  modified_base 12: mod_base = OTHER; note = 2'-O-Methyl nucleotide
  modified_base 13: mod_base = OTHER; note = 2'-fluoro nucleotide
  modified_base 14: mod_base = OTHER; note = 2'-O-Methyl nucleotide
  modified_base 15: mod_base = OTHER; note = 2'-fluoro nucleotide
  modified_base 16: mod_base = OTHER; note = 2'-O-Methyl nucleotide
  modified_base 17: mod_base = OTHER; note = 2'-fluoro nucleotide
  modified_base 18: mod_base = OTHER; note = 2'-O-Methyl nucleotide
  modified_base 19: mod_base = OTHER; note = 2'-fluoro nucleotide
  modified_base 20: mod_base = OTHER; note = deoxy-thymine phosphorothioate
  misc_feature 1..19: note = RNA
  misc_feature 20..21: note = DNA
tgccttgacgatacagctatt

SEQ ID NO: 61 - DNA, 21 bp, synthetic construct
  misc_feature 1..21: note = Description of Artificial Sequence: Synthetic oligonucleotide
  source 1..21: mol_type = other DNA
  modified_base 1: mod_base = OTHER; note = 2'-fluoro nucleotide
  modified_base 2: mod_base = OTHER; note = 2'-fluoro nucleotide
  modified_base 3: mod_base = OTHER; note = 2'-O-Methyl nucleotide
  modified_base 4: mod_base = OTHER; note = 2'-fluoro nucleotide
  modified_base 5: mod_base = OTHER; note = 2'-O-Methyl nucleotide
  modified_base 6: mod_base = OTHER; note = 2'-fluoro nucleotide
  modified_base 7: mod_base = OTHER; note = 2'-O-Methyl nucleotide
  modified_base 8: mod_base = OTHER; note = 2'-fluoro nucleotide
  modified_base 9: mod_base = OTHER; note = 2'-O-Methyl nucleotide
  modified_base 10: mod_base = OTHER; note = 2'-fluoro nucleotide
  modified_base 11: mod_base = OTHER; note = 2'-O-Methyl nucleotide
  modified_base 12: mod_base = OTHER; note = 2'-fluoro nucleotide
  modified_base 13: mod_base = OTHER; note = 2'-O-Methyl nucleotide
  modified_base 14: mod_base = OTHER; note = 2'-fluoro nucleotide
  modified_base 15: mod_base = OTHER; note = 2'-O-Methyl nucleotide
  modified_base 16: mod_base = OTHER; note = 2'-fluoro nucleotide
  modified_base 17: mod_base = OTHER; note = 2'-O-Methyl nucleotide
  modified_base 18: mod_base = OTHER; note = 2'-fluoro nucleotide
  modified_base 19: mod_base = OTHER; note = 2'-O-Methyl nucleotide
  modified_base 20: mod_base = OTHER; note = deoxy-thymine phosphorothioate
  misc_feature 1..19: note = RNA
  misc_feature 20..21: note = DNA
tagctgtatcgtcaaggcatt

SEQ ID NO: 62 - DNA, 21 bp, synthetic construct
  misc_feature 1..21: note = Description of Artificial Sequence: Synthetic oligonucleotide
  source 1..21: mol_type = other DNA
  modified_base 1: mod_base = OTHER; note = 2'-O-Methyl nucleotide
  modified_base 2: mod_base = OTHER; note = 2'-O-Methyl nucleotide
  modified_base 3: mod_base = OTHER; note = 2'-fluoro nucleotide
  modified_base 4: mod_base = OTHER; note = 2'-O-Methyl nucleotide
  modified_base 5: mod_base = OTHER; note = 2'-fluoro nucleotide
  modified_base 6: mod_base = OTHER; note = 2'-O-Methyl nucleotide
  modified_base 7: mod_base = OTHER; note = 2'-fluoro nucleotide
  modified_base 8: mod_base = OTHER; note = 2'-O-Methyl nucleotide
  modified_base 9: mod_base = OTHER; note = 2'-fluoro nucleotide
  modified_base 10: mod_base = OTHER; note = 2'-O-Methyl nucleotide
  modified_base 11: mod_base = OTHER; note = 2'-fluoro nucleotide
  modified_base 12: mod_base = OTHER; note = 2'-O-Methyl nucleotide
  modified_base 13: mod_base = OTHER; note = 2'-fluoro nucleotide
  modified_base 14: mod_base = OTHER; note = 2'-O-Methyl nucleotide
  modified_base 15: mod_base = OTHER; note = 2'-fluoro nucleotide
  modified_base 16: mod_base = OTHER; note = 2'-O-Methyl nucleotide
  modified_base 17: mod_base = OTHER; note = 2'-fluoro nucleotide
  modified_base 18: mod_base = OTHER; note = 2'-O-Methyl nucleotide
  modified_base 19: mod_base = OTHER; note = 2'-fluoro nucleotide
  modified_base 20: mod_base = OTHER; note = deoxy-thymine phosphorothioate
  misc_feature 1..19: note = RNA
  misc_feature 20..21: note = DNA
gccttgacgatacagctaatt

SEQ ID NO: 63 - DNA, 21 bp, synthetic construct
  misc_feature 1..21: note = Description of Artificial Sequence: Synthetic oligonucleotide
  source 1..21: mol_type = other DNA
  modified_base 1: mod_base = OTHER; note = 2'-fluoro nucleotide
  modified_base 2: mod_base = OTHER; note = 2'-fluoro nucleotide
  modified_base 3: mod_base = OTHER; note = 2'-O-Methyl nucleotide
  modified_base 4: mod_base = OTHER; note = 2'-fluoro nucleotide
  modified_base 5: mod_base = OTHER; note = 2'-O-Methyl nucleotide
  modified_base 6: mod_base = OTHER; note = 2'-fluoro nucleotide
  modified_base 7: mod_base = OTHER; note = 2'-O-Methyl nucleotide
  modified_base 8: mod_base = OTHER; note = 2'-fluoro nucleotide
  modified_base 9: mod_base = OTHER; note = 2'-O-Methyl nucleotide
  modified_base 10: mod_base = OTHER; note = 2'-fluoro nucleotide
  modified_base 11: mod_base = OTHER; note = 2'-O-Methyl nucleotide
  modified_base 12: mod_base = OTHER; note = 2'-fluoro nucleotide
  modified_base 13: mod_base = OTHER; note = 2'-O-Methyl nucleotide
  modified_base 14: mod_base = OTHER; note = 2'-fluoro nucleotide
  modified_base 15: mod_base = OTHER; note = 2'-O-Methyl nucleotide
  modified_base 16: mod_base = OTHER; note = 2'-fluoro nucleotide
  modified_base 17: mod_base = OTHER; note = 2'-O-Methyl nucleotide
  modified_base 18: mod_base = OTHER; note = 2'-fluoro nucleotide
  modified_base 19: mod_base = OTHER; note = 2'-O-Methyl nucleotide
  modified_base 20: mod_base = OTHER; note = deoxy-thymine phosphorothioate
  misc_feature 1..19: note = RNA
  misc_feature 20..21: note = DNA
ttagctgtatcgtcaaggctt

SEQ ID NO: 64 - DNA, 21 bp, synthetic construct
  misc_feature 1..21: note = Description of Artificial Sequence: Synthetic oligonucleotide
  source 1..21: mol_type = other DNA
  modified_base 1: mod_base = OTHER; note = 2'-O-Methyl nucleotide
  modified_base 2: mod_base = OTHER; note = 2'-O-Methyl nucleotide
  modified_base 3: mod_base = OTHER; note = 2'-fluoro nucleotide
  modified_base 4: mod_base = OTHER; note = 2'-O-Methyl nucleotide
  modified_base 5: mod_base = OTHER; note = 2'-fluoro nucleotide
  modified_base 6: mod_base = OTHER; note = 2'-O-Methyl nucleotide
  modified_base 7: mod_base = OTHER; note = 2'-fluoro nucleotide
  modified_base 8: mod_base = OTHER; note = 2'-O-Methyl nucleotide
  modified_base 9: mod_base = OTHER; note = 2'-fluoro nucleotide
  modified_base 10: mod_base = OTHER; note = 2'-O-Methyl nucleotide
  modified_base 11: mod_base = OTHER; note = 2'-fluoro nucleotide
  modified_base 12: mod_base = OTHER; note = 2'-O-Methyl nucleotide
  modified_base 13: mod_base = OTHER; note = 2'-fluoro nucleotide
  modified_base 14: mod_base = OTHER; note = 2'-O-Methyl nucleotide
  modified_base 15: mod_base = OTHER; note = 2'-fluoro nucleotide
  modified_base 16: mod_base = OTHER; note = 2'-O-Methyl nucleotide
  modified_base 17: mod_base = OTHER; note = 2'-fluoro nucleotide
  modified_base 18: mod_base = OTHER; note = 2'-O-Methyl nucleotide
  modified_base 19: mod_base = OTHER; note = 2'-fluoro nucleotide
  modified_base 20: mod_base = OTHER; note = deoxy-thymine phosphorothioate
  misc_feature 1..19: note = RNA
  misc_feature 20..21: note = DNA
ttgacgatacagctaattctt

SEQ ID NO: 65 - DNA, 21 bp, synthetic construct
  misc_feature 1..21: note = Description of Artificial Sequence: Synthetic oligonucleotide
  source 1..21: mol_type = other DNA
  modified_base 1: mod_base = OTHER; note = 2'-fluoro nucleotide
  modified_base 2: mod_base = OTHER; note = 2'-fluoro nucleotide
  modified_base 3: mod_base = OTHER; note = 2'-O-Methyl nucleotide
  modified_base 4: mod_base = OTHER; note = 2'-fluoro nucleotide
  modified_base 5: mod_base = OTHER; note = 2'-O-Methyl nucleotide
  modified_base 6: mod_base = OTHER; note = 2'-fluoro nucleotide
  modified_base 7: mod_base = OTHER; note = 2'-O-Methyl nucleotide
  modified_base 8: mod_base = OTHER; note = 2'-fluoro nucleotide
  modified_base 9: mod_base = OTHER; note = 2'-O-Methyl nucleotide
  modified_base 10: mod_base = OTHER; note = 2'-fluoro nucleotide
  modified_base 11: mod_base = OTHER; note = 2'-O-Methyl nucleotide
  modified_base 12: mod_base = OTHER; note = 2'-fluoro nucleotide
  modified_base 13: mod_base = OTHER; note = 2'-O-Methyl nucleotide
  modified_base 14: mod_base = OTHER; note = 2'-fluoro nucleotide
  modified_base 15: mod_base = OTHER; note = 2'-O-Methyl nucleotide
  modified_base 16: mod_base = OTHER; note = 2'-fluoro nucleotide
  modified_base 17: mod_base = OTHER; note = 2'-O-Methyl nucleotide
  modified_base 18: mod_base = OTHER; note = 2'-fluoro nucleotide
  modified_base 19: mod_base = OTHER; note = 2'-O-Methyl nucleotide
  modified_base 20: mod_base = OTHER; note = deoxy-thymine phosphorothioate
  misc_feature 1..19: note = RNA
  misc_feature 20..21: note = DNA
gaattagctgtatcgtcaatt

SEQ ID NO: 66 - DNA, 21 bp, synthetic construct
  misc_feature 1..21: note = Description of Artificial Sequence: Synthetic oligonucleotide
  source 1..21: mol_type = other DNA
  modified_base 1: mod_base = OTHER; note = 2'-O-Methyl nucleotide
  modified_base 2: mod_base = OTHER; note = 2'-O-Methyl nucleotide
  modified_base 3: mod_base = OTHER; note = 2'-fluoro nucleotide
  modified_base 4: mod_base = OTHER; note = 2'-O-Methyl nucleotide
  modified_base 5: mod_base = OTHER; note = 2'-fluoro nucleotide
  modified_base 6: mod_base = OTHER; note = 2'-O-Methyl nucleotide
  modified_base 7: mod_base = OTHER; note = 2'-fluoro nucleotide
  modified_base 8: mod_base = OTHER; note = 2'-O-Methyl nucleotide
  modified_base 9: mod_base = OTHER; note = 2'-fluoro nucleotide
  modified_base 10: mod_base = OTHER; note = 2'-O-Methyl nucleotide
  modified_base 11: mod_base = OTHER; note = 2'-fluoro nucleotide
  modified_base 12: mod_base = OTHER; note = 2'-O-Methyl nucleotide
  modified_base 13: mod_base = OTHER; note = 2'-fluoro nucleotide
  modified_base 14: mod_base = OTHER; note = 2'-O-Methyl nucleotide
  modified_base 15: mod_base = OTHER; note = 2'-fluoro nucleotide
  modified_base 16: mod_base = OTHER; note = 2'-O-Methyl nucleotide
  modified_base 17: mod_base = OTHER; note = 2'-fluoro nucleotide
  modified_base 18: mod_base = OTHER; note = 2'-O-Methyl nucleotide
  modified_base 19: mod_base = OTHER; note = 2'-fluoro nucleotide
  modified_base 20: mod_base = OTHER; note = deoxy-thymine phosphorothioate
  misc_feature 1..19: note = RNA
  misc_feature 20..21: note = DNA
tgacgatacagctaattcatt

SEQ ID NO: 67 - DNA, 21 bp, synthetic construct
  misc_feature 1..21: note = Description of Artificial Sequence: Synthetic oligonucleotide
  source 1..21: mol_type = other DNA
  modified_base 1: mod_base = OTHER; note = 2'-fluoro nucleotide
  modified_base 2: mod_base = OTHER; note = 2'-fluoro nucleotide
  modified_base 3: mod_base = OTHER; note = 2'-O-Methyl nucleotide
  modified_base 4: mod_base = OTHER; note = 2'-fluoro nucleotide
  modified_base 5: mod_base = OTHER; note = 2'-O-Methyl nucleotide
  modified_base 6: mod_base = OTHER; note = 2'-fluoro nucleotide
  modified_base 7: mod_base = OTHER; note = 2'-O-Methyl nucleotide
  modified_base 8: mod_base = OTHER; note = 2'-fluoro nucleotide
  modified_base 9: mod_base = OTHER; note = 2'-O-Methyl nucleotide
  modified_base 10: mod_base = OTHER; note = 2'-fluoro nucleotide
  modified_base 11: mod_base = OTHER; note = 2'-O-Methyl nucleotide
  modified_base 12: mod_base = OTHER; note = 2'-fluoro nucleotide
  modified_base 13: mod_base = OTHER; note = 2'-O-Methyl nucleotide
  modified_base 14: mod_base = OTHER; note = 2'-fluoro nucleotide
  modified_base 15: mod_base = OTHER; note = 2'-O-Methyl nucleotide
  modified_base 16: mod_base = OTHER; note = 2'-fluoro nucleotide
  modified_base 17: mod_base = OTHER; note = 2'-O-Methyl nucleotide
  modified_base 18: mod_base = OTHER; note = 2'-fluoro nucleotide
  modified_base 19: mod_base = OTHER; note = 2'-O-Methyl nucleotide
  modified_base 20: mod_base = OTHER; note = deoxy-thymine phosphorothioate
  misc_feature 1..19: note = RNA
  misc_feature 20..21: note = DNA
tgaattagctgtatcgtcatt

SEQ ID NO: 68 - DNA, 21 bp, synthetic construct
  misc_feature 1..21: note = Description of Artificial Sequence: Synthetic oligonucleotide
  source 1..21: mol_type = other DNA
  modified_base 1: mod_base = OTHER; note = 2'-O-Methyl nucleotide
  modified_base 2: mod_base = OTHER; note = 2'-O-Methyl nucleotide
  modified_base 3: mod_base = OTHER; note = 2'-fluoro nucleotide
  modified_base 4: mod_base = OTHER; note = 2'-O-Methyl nucleotide
  modified_base 5: mod_base = OTHER; note = 2'-fluoro nucleotide
  modified_base 6: mod_base = OTHER; note = 2'-O-Methyl nucleotide
  modified_base 7: mod_base = OTHER; note = 2'-fluoro nucleotide
  modified_base 8: mod_base = OTHER; note = 2'-O-Methyl nucleotide
  modified_base 9: mod_base = OTHER; note = 2'-fluoro nucleotide
  modified_base 10: mod_base = OTHER; note = 2'-O-Methyl nucleotide
  modified_base 11: mod_base = OTHER; note = 2'-fluoro nucleotide
  modified_base 12: mod_base = OTHER; note = 2'-O-Methyl nucleotide
  modified_base 13: mod_base = OTHER; note = 2'-fluoro nucleotide
  modified_base 14: mod_base = OTHER; note = 2'-O-Methyl nucleotide
  modified_base 15: mod_base = OTHER; note = 2'-fluoro nucleotide
  modified_base 16: mod_base = OTHER; note = 2'-O-Methyl nucleotide
  modified_base 17: mod_base = OTHER; note = 2'-fluoro nucleotide
  modified_base 18: mod_base = OTHER; note = 2'-O-Methyl nucleotide
  modified_base 19: mod_base = OTHER; note = 2'-fluoro nucleotide
  modified_base 20: mod_base = OTHER; note = deoxy-thymine phosphorothioate
  misc_feature 1..19: note = RNA
  misc_feature 20..21: note = DNA
cagctaattcagaatcatttt

SEQ ID NO: 69 - DNA, 21 bp, synthetic construct
  misc_feature 1..21: note = Description of Artificial Sequence: Synthetic oligonucleotide
  source 1..21: mol_type = other DNA
  modified_base 1: mod_base = OTHER; note = 2'-fluoro nucleotide
  modified_base 2: mod_base = OTHER; note = 2'-fluoro nucleotide
  modified_base 3: mod_base = OTHER; note = 2'-O-Methyl nucleotide
  modified_base 4: mod_base = OTHER; note = 2'-fluoro nucleotide
  modified_base 5: mod_base = OTHER; note = 2'-O-Methyl nucleotide
  modified_base 6: mod_base = OTHER; note = 2'-fluoro nucleotide
  modified_base 7: mod_base = OTHER; note = 2'-O-Methyl nucleotide
  modified_base 8: mod_base = OTHER; note = 2'-fluoro nucleotide
  modified_base 9: mod_base = OTHER; note = 2'-O-Methyl nucleotide
  modified_base 10: mod_base = OTHER; note = 2'-fluoro nucleotide
  modified_base 11: mod_base = OTHER; note = 2'-O-Methyl nucleotide
  modified_base 12: mod_base = OTHER; note = 2'-fluoro nucleotide
  modified_base 13: mod_base = OTHER; note = 2'-O-Methyl nucleotide
  modified_base 14: mod_base = OTHER; note = 2'-fluoro nucleotide
  modified_base 15: mod_base = OTHER; note = 2'-O-Methyl nucleotide
  modified_base 16: mod_base = OTHER; note = 2'-fluoro nucleotide
  modified_base 17: mod_base = OTHER; note = 2'-O-Methyl nucleotide
  modified_base 18: mod_base = OTHER; note = 2'-fluoro nucleotide
  modified_base 19: mod_base = OTHER; note = 2'-O-Methyl nucleotide
  modified_base 20: mod_base = OTHER; note = deoxy-thymine phosphorothioate
  misc_feature 1..19: note = RNA
  misc_feature 20..21: note = DNA
aatgattctgaattagctgtt

SEQ ID NO: 70 - DNA, 21 bp, synthetic construct
  misc_feature 1..21: note = Description of Artificial Sequence: Synthetic oligonucleotide
  source 1..21: mol_type = other DNA
  modified_base 1: mod_base = OTHER; note = 2'-O-Methyl nucleotide
  modified_base 2: mod_base = OTHER; note = 2'-O-Methyl nucleotide
  modified_base 3: mod_base = OTHER; note = 2'-fluoro nucleotide
  modified_base 4: mod_base = OTHER; note = 2'-O-Methyl nucleotide
  modified_base 5: mod_base = OTHER; note = 2'-fluoro nucleotide
  modified_base 6: mod_base = OTHER; note = 2'-O-Methyl nucleotide
  modified_base 7: mod_base = OTHER; note = 2'-fluoro nucleotide
  modified_base 8: mod_base = OTHER; note = 2'-O-Methyl nucleotide
  modified_base 9: mod_base = OTHER; note = 2'-fluoro nucleotide
  modified_base 10: mod_base = OTHER; note = 2'-O-Methyl nucleotide
  modified_base 11: mod_base = OTHER; note = 2'-fluoro nucleotide
  modified_base 12: mod_base = OTHER; note = 2'-O-Methyl nucleotide
  modified_base 13: mod_base = OTHER; note = 2'-fluoro nucleotide
  modified_base 14: mod_base = OTHER; note = 2'-O-Methyl nucleotide
  modified_base 15: mod_base = OTHER; note = 2'-fluoro nucleotide
  modified_base 16: mod_base = OTHER; note = 2'-O-Methyl nucleotide
  modified_base 17: mod_base = OTHER; note = 2'-fluoro nucleotide
  modified_base 18: mod_base = OTHER; note = 2'-O-Methyl nucleotide
  modified_base 19: mod_base = OTHER; note = 2'-fluoro nucleotide
  modified_base 20: mod_base = OTHER; note = deoxy-thymine phosphorothioate
  misc_feature 1..19: note = RNA
  misc_feature 20..21: note = DNA
gtggacgaatatgatccaatt

SEQ ID NO: 71 - DNA, 21 bp, synthetic construct
  misc_feature 1..21: note = Description of Artificial Sequence: Synthetic oligonucleotide
  source 1..21: mol_type = other DNA
  modified_base 1: mod_base = OTHER; note = 2'-fluoro nucleotide
  modified_base 2: mod_base = OTHER; note = 2'-fluoro nucleotide
  modified_base 3: mod_base = OTHER; note = 2'-O-Methyl nucleotide
  modified_base 4: mod_base = OTHER; note = 2'-fluoro nucleotide
  modified_base 5: mod_base = OTHER; note = 2'-O-Methyl nucleotide
  modified_base 6: mod_base = OTHER; note = 2'-fluoro nucleotide
  modified_base 7: mod_base = OTHER; note = 2'-O-Methyl nucleotide
  modified_base 8: mod_base = OTHER; note = 2'-fluoro nucleotide
  modified_base 9: mod_base = OTHER; note = 2'-O-Methyl nucleotide
  modified_base 10: mod_base = OTHER; note = 2'-fluoro nucleotide
  modified_base 11: mod_base = OTHER; note = 2'-O-Methyl nucleotide
  modified_base 12: mod_base = OTHER; note = 2'-fluoro nucleotide
  modified_base 13: mod_base = OTHER; note = 2'-O-Methyl nucleotide
  modified_base 14: mod_base = OTHER; note = 2'-fluoro nucleotide
  modified_base 15: mod_base = OTHER; note = 2'-O-Methyl nucleotide
  modified_base 16: mod_base = OTHER; note = 2'-fluoro nucleotide
  modified_base 17: mod_base = OTHER; note = 2'-O-Methyl nucleotide
  modified_base 18: mod_base = OTHER; note = 2'-fluoro nucleotide
  modified_base 19: mod_base = OTHER; note = 2'-O-Methyl nucleotide
  modified_base 20: mod_base = OTHER; note = deoxy-thymine phosphorothioate
  misc_feature 1..19: note = RNA
  misc_feature 20..21: note = DNA
ttggatcatattcgtccactt

SEQ ID NO: 72 - DNA, 21 bp, synthetic construct
  misc_feature 1..21: note = Description of Artificial Sequence: Synthetic oligonucleotide
  source 1..21: mol_type = other DNA
  modified_base 1: mod_base = OTHER; note = 2'-O-Methyl nucleotide
  modified_base 2: mod_base = OTHER; note = 2'-O-Methyl nucleotide
  modified_base 3: mod_base = OTHER; note = 2'-fluoro nucleotide
  modified_base 4: mod_base = OTHER; note = 2'-O-Methyl nucleotide
  modified_base 5: mod_base = OTHER; note = 2'-fluoro nucleotide
  modified_base 6: mod_base = OTHER; note = 2'-O-Methyl nucleotide
  modified_base 7: mod_base = OTHER; note = 2'-fluoro nucleotide
  modified_base 8: mod_base = OTHER; note = 2'-O-Methyl nucleotide
  modified_base 9: mod_base = OTHER; note = 2'-fluoro nucleotide
  modified_base 10: mod_base = OTHER; note = 2'-O-Methyl nucleotide
  modified_base 11: mod_base = OTHER; note = 2'-fluoro nucleotide
  modified_base 12: mod_base = OTHER; note = 2'-O-Methyl nucleotide
  modified_base 13: mod_base = OTHER; note = 2'-fluoro nucleotide
  modified_base 14: mod_base = OTHER; note = 2'-O-Methyl nucleotide
  modified_base 15: mod_base = OTHER; note = 2'-fluoro nucleotide
  modified_base 16: mod_base = OTHER; note = 2'-O-Methyl nucleotide
  modified_base 17: mod_base = OTHER; note = 2'-fluoro nucleotide
  modified_base 18: mod_base = OTHER; note = 2'-O-Methyl nucleotide
  modified_base 19: mod_base = OTHER; note = 2'-fluoro nucleotide
  modified_base 20: mod_base = OTHER; note = deoxy-thymine phosphorothioate
  misc_feature 1..19: note = RNA
  misc_feature 20..21: note = DNA
gacgaatatgatccaacaatt

SEQ ID NO: 73 - DNA, 21 bp, synthetic construct
  misc_feature 1..21: note = Description of Artificial Sequence: Synthetic oligonucleotide
  source 1..21: mol_type = other DNA
  modified_base 1: mod_base = OTHER; note = 2'-fluoro nucleotide
  modified_base 2: mod_base = OTHER; note = 2'-fluoro nucleotide
  modified_base 3: mod_base = OTHER; note = 2'-O-Methyl nucleotide
  modified_base 4: mod_base = OTHER; note = 2'-fluoro nucleotide
  modified_base 5: mod_base = OTHER; note = 2'-O-Methyl nucleotide
  modified_base 6: mod_base = OTHER; note = 2'-fluoro nucleotide
  modified_base 7: mod_base = OTHER; note = 2'-O-Methyl nucleotide
  modified_base 8: mod_base = OTHER; note = 2'-fluoro nucleotide
  modified_base 9: mod_base = OTHER; note = 2'-O-Methyl nucleotide
  modified_base 10: mod_base = OTHER; note = 2'-fluoro nucleotide
  modified_base 11: mod_base = OTHER; note = 2'-O-Methyl nucleotide
  modified_base 12: mod_base = OTHER; note = 2'-fluoro nucleotide
  modified_base 13: mod_base = OTHER; note = 2'-O-Methyl nucleotide
  modified_base 14: mod_base = OTHER; note = 2'-fluoro nucleotide
  modified_base 15: mod_base = OTHER; note = 2'-O-Methyl nucleotide
  modified_base 16: mod_base = OTHER; note = 2'-fluoro nucleotide
  modified_base 17: mod_base = OTHER; note = 2'-O-Methyl nucleotide
  modified_base 18: mod_base = OTHER; note = 2'-fluoro nucleotide
  modified_base 19: mod_base = OTHER; note = 2'-O-Methyl nucleotide
  modified_base 20: mod_base = OTHER; note = deoxy-thymine phosphorothioate
  misc_feature 1..19: note = RNA
  misc_feature 20..21: note = DNA
ttgttggatcatattcgtctt

SEQ ID NO: 74 - DNA, 21 bp, synthetic construct
  misc_feature 1..21: note = Description of Artificial Sequence: Synthetic oligonucleotide
  source 1..21: mol_type = other DNA
  modified_base 1: mod_base = OTHER; note = 2'-O-Methyl nucleotide
  modified_base 2: mod_base = OTHER; note = 2'-O-Methyl nucleotide
  modified_base 3: mod_base = OTHER; note = 2'-fluoro nucleotide
  modified_base 4: mod_base = OTHER; note = 2'-O-Methyl nucleotide
  modified_base 5: mod_base = OTHER; note = 2'-fluoro nucleotide
  modified_base 6: mod_base = OTHER; note = 2'-O-Methyl nucleotide
  modified_base 7: mod_base = OTHER; note = 2'-fluoro nucleotide
  modified_base 8: mod_base = OTHER; note = 2'-O-Methyl nucleotide
  modified_base 9: mod_base = OTHER; note = 2'-fluoro nucleotide
  modified_base 10: mod_base = OTHER; note = 2'-O-Methyl nucleotide
  modified_base 11: mod_base = OTHER; note = 2'-fluoro nucleotide
  modified_base 12: mod_base = OTHER; note = 2'-O-Methyl nucleotide
  modified_base 13: mod_base = OTHER; note = 2'-fluoro nucleotide
  modified_base 14: mod_base = OTHER; note = 2'-O-Methyl nucleotide
  modified_base 15: mod_base = OTHER; note = 2'-fluoro nucleotide
  modified_base 16: mod_base = OTHER; note = 2'-O-Methyl nucleotide
  modified_base 17: mod_base = OTHER; note = 2'-fluoro nucleotide
  modified_base 18: mod_base = OTHER; note = 2'-O-Methyl nucleotide
  modified_base 19: mod_base = OTHER; note = 2'-fluoro nucleotide
  modified_base 20: mod_base = OTHER; note = deoxy-thymine phosphorothioate
  misc_feature 1..19: note = RNA
  misc_feature 20..21: note = DNA
acgaatatgatccaacaattt

SEQ ID NO: 75 - DNA, 21 bp, synthetic construct
  misc_feature 1..21: note = Description of Artificial Sequence: Synthetic oligonucleotide
  source 1..21: mol_type = other DNA
  modified_base 1: mod_base = OTHER; note = 2'-fluoro nucleotide
  modified_base 2: mod_base = OTHER; note = 2'-fluoro nucleotide
  modified_base 3: mod_base = OTHER; note = 2'-O-Methyl nucleotide
  modified_base 4: mod_base = OTHER; note = 2'-fluoro nucleotide
  modified_base 5: mod_base = OTHER; note = 2'-O-Methyl nucleotide
  modified_base 6: mod_base = OTHER; note = 2'-fluoro nucleotide
  modified_base 7: mod_base = OTHER; note = 2'-O-Methyl nucleotide
  modified_base 8: mod_base = OTHER; note = 2'-fluoro nucleotide
  modified_base 9: mod_base = OTHER; note = 2'-O-Methyl nucleotide
  modified_base 10: mod_base = OTHER; note = 2'-fluoro nucleotide
  modified_base 11: mod_base = OTHER; note = 2'-O-Methyl nucleotide
  modified_base 12: mod_base = OTHER; note = 2'-fluoro nucleotide
  modified_base 13: mod_base = OTHER; note = 2'-O-Methyl nucleotide
  modified_base 14: mod_base = OTHER; note = 2'-fluoro nucleotide
  modified_base 15: mod_base = OTHER; note = 2'-O-Methyl nucleotide
  modified_base 16: mod_base = OTHER; note = 2'-fluoro nucleotide
  modified_base 17: mod_base = OTHER; note = 2'-O-Methyl nucleotide
  modified_base 18: mod_base = OTHER; note = 2'-fluoro nucleotide
  modified_base 19: mod_base = OTHER; note = 2'-O-Methyl nucleotide
  modified_base 20: mod_base = OTHER; note = deoxy-thymine phosphorothioate
  misc_feature 1..19: note = RNA
  misc_feature 20..21: note = DNA
attgttggatcatattcgttt

SEQ ID NO: 76 - RNA, 23 nt, Homo sapiens
  source 1..23: mol_type = unassigned RNA
ggcggccggagtcccgagctagc

SEQ ID NO: 77 - RNA, 23 nt, Homo sapiens
  source 1..23: mol_type = unassigned RNA
ggccggagtcccgagctagcccc

SEQ ID NO: 78 - RNA, 23 nt, Homo sapiens
  source 1..23: mol_type = unassigned RNA
gccggagtcccgagctagccccg

SEQ ID NO: 79 - RNA, 23 nt, Homo sapiens
  source 1..23: mol_type = unassigned RNA
ccggagtcccgagctagccccgg

SEQ ID NO: 80 - RNA, 23 nt, Homo sapiens
  source 1..23: mol_type = unassigned RNA
cggagtcccgagctagccccggc

SEQ ID NO: 81 - RNA, 23 nt, Homo sapiens
  source 1..23: mol_type = unassigned RNA
ggagtcccgagctagccccggcg

SEQ ID NO: 82 - RNA, 23 nt, Homo sapiens
  source 1..23: mol_type = unassigned RNA
gagtcccgagctagccccggcgg

SEQ ID NO: 83 - RNA, 23 nt, Homo sapiens
  source 1..23: mol_type = unassigned RNA
gtcccgagctagccccggcggcc

SEQ ID NO: 84 - RNA, 23 nt, Homo sapiens
  source 1..23: mol_type = unassigned RNA
ccggacgacaggccacctcgtcg

SEQ ID NO: 85 - RNA, 23 nt, Homo sapiens
  source 1..23: mol_type = unassigned RNA
cggacgacaggccacctcgtcgg

SEQ ID NO: 86 - RNA, 23 nt, Homo sapiens
  source 1..23: mol_type = unassigned RNA
ggacgacaggccacctcgtcggc

SEQ ID NO: 87 - RNA, 23 nt, Homo sapiens
  source 1..23: mol_type = unassigned RNA
gacgacaggccacctcgtcggcg

SEQ ID NO: 88 - RNA, 23 nt, Homo sapiens
  source 1..23: mol_type = unassigned RNA
acgacaggccacctcgtcggcgt

SEQ ID NO: 89 - RNA, 23 nt, Homo sapiens
  source 1..23: mol_type = unassigned RNA
gacaggccacctcgtcggcgtcc

SEQ ID NO: 90 - RNA, 23 nt, Homo sapiens
  source 1..23: mol_type = unassigned RNA
acaggccacctcgtcggcgtccg

SEQ ID NO: 91 - RNA, 23 nt, Homo sapiens
  source 1..23: mol_type = unassigned RNA
caggccacctcgtcggcgtccgc

SEQ ID NO: 92 - RNA, 23 nt, Homo sapiens
  source 1..23: mol_type = unassigned RNA
aggccacctcgtcggcgtccgcc

SEQ ID NO: 93 - RNA, 23 nt, Homo sapiens
  source 1..23: mol_type = unassigned RNA
ggccacctcgtcggcgtccgccc

SEQ ID NO: 94 - RNA, 23 nt, Homo sapiens
  source 1..23: mol_type = unassigned RNA
gccacctcgtcggcgtccgcccg

SEQ ID NO: 95 - RNA, 23 nt, Homo sapiens
  source 1..23: mol_type = unassigned RNA
ccacctcgtcggcgtccgcccga

SEQ ID NO: 96 - RNA, 23 nt, Homo sapiens
  source 1..23: mol_type = unassigned RNA
cacctcgtcggcgtccgcccgag

SEQ ID NO: 97 - RNA, 23 nt, Homo sapiens
  source 1..23: mol_type = unassigned RNA
acctcgtcggcgtccgcccgagt

SEQ ID NO: 98 - RNA, 23 nt, Homo sapiens
  source 1..23: mol_type = unassigned RNA
cctcgtcggcgtccgcccgagtc

SEQ ID NO: 99 - RNA, 23 nt, Homo sapiens
  source 1..23: mol_type = unassigned RNA
ctcgtcggcgtccgcccgagtcc

SEQ ID NO: 100 - RNA, 23 nt, Homo sapiens
  source 1..23: mol_type = unassigned RNA
tcgtcggcgtccgcccgagtccc

SEQ ID NO: 101 - RNA, 23 nt, Homo sapiens
  source 1..23: mol_type = unassigned RNA
cgtcggcgtccgcccgagtcccc

SEQ ID NO: 102 - RNA, 23 nt, Homo sapiens
  source 1..23: mol_type = unassigned RNA
cggcgtccgcccgagtccccgcc

SEQ ID NO: 103 - RNA, 23 nt, Homo sapiens
  source 1..23: mol_type = unassigned RNA
ggcgtccgcccgagtccccgcct

SEQ ID NO: 104 - RNA, 23 nt, Homo sapiens
  source 1..23: mol_type = unassigned RNA
ccgcccgagtccccgcctcgccg

SEQ ID NO: 105 - RNA, 23 nt, Homo sapiens
  source 1..23: mol_type = unassigned RNA
ccaacgccacaaccaccgcgcac

SEQ ID NO: 106 - RNA, 23 nt, Homo sapiens
  source 1..23: mol_type = unassigned RNA
caacgccacaaccaccgcgcacg

SEQ ID NO: 107 - RNA, 23 nt, Homo sapiens
  source 1..23: mol_type = unassigned RNA
aacgccacaaccaccgcgcacgg

SEQ ID NO: 108 - RNA, 23 nt, Homo sapiens
  source 1..23: mol_type = unassigned RNA
cgccacaaccaccgcgcacggcc

SEQ ID NO: 109 - RNA, 23 nt, Homo sapiens
  source 1..23: mol_type = unassigned RNA
gccacaaccaccgcgcacggccc

SEQ ID NO: 110 - RNA, 23 nt, Homo sapiens
  source 1..23: mol_type = unassigned RNA
ccacaaccaccgcgcacggcccc

SEQ ID NO: 111 - RNA, 23 nt, Homo sapiens
  source 1..23: mol_type = unassigned RNA
cgatgcgaccctccgggacggcc

SEQ ID NO: 112 - RNA, 23 nt, Homo sapiens
  source 1..23: mol_type = unassigned RNA
gatgcgaccctccgggacggccg

SEQ ID NO: 113 - RNA, 23 nt, Homo sapiens
  source 1..23: mol_type = unassigned RNA
atgcgaccctccgggacggccgg

SEQ ID NO: 114 - RNA, 23 nt, Homo sapiens
  source 1..23: mol_type = unassigned RNA
gcgaccctccgggacggccgggg

SEQ ID NO: 115 - RNA, 23 nt, Homo sapiens
  source 1..23: mol_type = unassigned RNA
cgaccctccgggacggccggggc

SEQ ID NO: 116 - RNA, 23 nt, Homo sapiens
  source 1..23: mol_type = unassigned RNA
accctccgggacggccggggcag

SEQ ID NO: 117 - RNA, 23 nt, Homo sapiens
  source 1..23: mol_type = unassigned RNA
aaagaaagtttgccaaggcacga

SEQ ID NO: 118 - RNA, 23 nt, Homo sapiens
  source 1..23: mol_type = unassigned RNA
aagaaagtttgccaaggcacgag

SEQ ID NO: 119 - RNA, 23 nt, Homo sapiens
  source 1..23: mol_type = unassigned RNA
gaaagtttgccaaggcacgagta

SEQ ID NO: 120 - RNA, 23 nt, Homo sapiens
  source 1..23: mol_type = unassigned RNA
aaagtttgccaaggcacgagtaa

SEQ ID NO: 121 - RNA, 23 nt, Homo sapiens
  source 1..23: mol_type = unassigned RNA
aagtttgccaaggcacgagtaac

SEQ ID NO: 122 - RNA, 23 nt, Homo sapiens
  source 1..23: mol_type = unassigned RNA
agtttgccaaggcacgagtaaca

SEQ ID NO: 123 - RNA, 23 nt, Homo sapiens
  source 1..23: mol_type = unassigned RNA
gtttgccaaggcacgagtaacaa

SEQ ID NO: 124 - RNA, 23 nt, Homo sapiens
  source 1..23: mol_type = unassigned RNA
tttgccaaggcacgagtaacaag

SEQ ID NO: 125 - RNA, 23 nt, Homo sapiens
  source 1..23: mol_type = unassigned RNA
ttgccaaggcacgagtaacaagc

SEQ ID NO: 126 - RNA, 23 nt, Homo sapiens
  source 1..23: mol_type = unassigned RNA
tcacgcagttgggcacttttgaa

SEQ ID NO: 127 - RNA, 23 nt, Homo sapiens
  source 1..23: mol_type = unassigned RNA
cacgcagttgggcacttttgaag

SEQ ID NO: 128 - RNA, 23 nt, Homo sapiens
  source 1..23: mol_type = unassigned RNA
acgcagttgggcacttttgaaga

SEQ ID NO: 129 - RNA, 23 nt, Homo sapiens
  source 1..23: mol_type = unassigned RNA
cgcagttgggcacttttgaagat

SEQ ID NO: 130 - RNA, 23 nt, Homo sapiens
  source 1..23: mol_type = unassigned RNA
gcagttgggcacttttgaagatc

SEQ ID NO: 131 - RNA, 23 nt, Homo sapiens
  source 1..23: mol_type = unassigned RNA
cagttgggcacttttgaagatca

SEQ ID NO: 132 - RNA, 23 nt, Homo sapiens
  source 1..23: mol_type = unassigned RNA
agttgggcacttttgaagatcat

SEQ ID NO: 133 - RNA, 23 nt, Homo sapiens
  source 1..23: mol_type = unassigned RNA
gttgggcacttttgaagatcatt

SEQ ID NO: 134 - RNA, 23 nt, Homo sapiens
  source 1..23: mol_type = unassigned RNA
ttgggcacttttgaagatcattt

SEQ ID NO: 135 - RNA, 23 nt, Homo sapiens
  source 1..23: mol_type = unassigned RNA
ttttgaagatcattttctcagcc

SEQ ID NO: 136 - RNA, 23 nt, Homo sapiens
  source 1..23: mol_type = unassigned RNA
ttgaagatcattttctcagcctc

SEQ ID NO: 137 - RNA, 23 nt, Homo sapiens
  source 1..23: mol_type = unassigned RNA
tgaagatcattttctcagcctcc

SEQ ID NO: 138 - RNA, 23 nt, Homo sapiens
  source 1..23: mol_type = unassigned RNA
atcattttctcagcctccagagg

SEQ ID NO: 139 - RNA, 23 nt, Homo sapiens
  source 1..23: mol_type = unassigned RNA
tcagcctccagaggatgttcaat

SEQ ID NO: 140 - RNA, 23 nt, Homo sapiens
  source 1..23: mol_type = unassigned RNA
agcctccagaggatgttcaataa

SEQ ID NO: 141 - RNA, 23 nt, Homo sapiens
  source 1..23: mol_type = unassigned RNA
gcctccagaggatgttcaataac

SEQ ID NO: 142 - RNA, 23 nt, Homo sapiens
  source 1..23: mol_type = unassigned RNA
ccagaggatgttcaataactgtg

SEQ ID NO: 143 - RNA, 23 nt, Homo sapiens
  source 1..23: mol_type = unassigned RNA
agaggatgttcaataactgtgag

SEQ ID NO: 144 - RNA, 23 nt, Homo sapiens
  source 1..23: mol_type = unassigned RNA
gatgttcaataactgtgaggtgg

SEQ ID NO: 145 - RNA, 23 nt, Homo sapiens
  source 1..23: mol_type = unassigned RNA
tgttcaataactgtgaggtggtc

SEQ ID NO: 146 - RNA, 23 nt, Homo sapiens
  source 1..23: mol_type = unassigned RNA
gttcaataactgtgaggtggtcc

SEQ ID NO: 147 - RNA, 23 nt, Homo sapiens
  source 1..23: mol_type = unassigned RNA
ttcaataactgtgaggtggtcct

SEQ ID NO: 148 - RNA, 23 nt, Homo sapiens
  source 1..23: mol_type = unassigned RNA
tcaataactgtgaggtggtcctt

SEQ ID NO: 149 - RNA, 23 nt, Homo sapiens
  source 1..23: mol_type = unassigned RNA
caataactgtgaggtggtccttg

SEQ ID NO: 150 - RNA, 23 nt, Homo sapiens
  source 1..23: mol_type = unassigned RNA
aataactgtgaggtggtccttgg

SEQ ID NO: 151 - RNA, 23 nt, Homo sapiens
  source 1..23: mol_type = unassigned RNA
taactgtgaggtggtccttggga

SEQ ID NO: 152 - RNA, 23 nt, Homo sapiens
  source 1..23: mol_type = unassigned RNA
actgtgaggtggtccttgggaat

SEQ ID NO: 153 - RNA, 23 nt, Homo sapiens
  source 1..23: mol_type = unassigned RNA
ctgtgaggtggtccttgggaatt

SEQ ID NO: 154 - RNA, 23 nt, Homo sapiens
  source 1..23: mol_type = unassigned RNA
ggtggtccttgggaatttggaaa

SEQ ID NO: 155 - RNA, 23 nt, Homo sapiens
  source 1..23: mol_type = unassigned RNA
ccttgggaatttggaaattacct

SEQ ID NO: 156 - RNA, 23 nt, Homo sapiens
  source 1..23: mol_type = unassigned RNA
cttgggaatttggaaattaccta

SEQ ID NO: 157 - RNA, 23 nt, Homo sapiens
  source 1..23: mol_type = unassigned RNA
ttgggaatttggaaattacctat

SEQ ID NO: 158 - RNA, 23 nt, Homo sapiens
  source 1..23: mol_type = unassigned RNA
tgggaatttggaaattacctatg

SEQ ID NO: 159 - RNA, 23 nt, Homo sapiens
  source 1..23: mol_type = unassigned RNA
gcagaggaattatgatctttcct

SEQ ID NO: 160 - RNA, 23 nt, Homo sapiens
  source 1..23: mol_type = unassigned RNA
cagaggaattatgatctttcctt

SEQ ID NO: 161 - RNA, 23 nt, Homo sapiens
  source 1..23: mol_type = unassigned RNA
ggaattatgatctttccttctta

SEQ ID NO: 162 - RNA, 23 nt, Homo sapiens
  source 1..23: mol_type = unassigned RNA
gaattatgatctttccttcttaa

SEQ ID NO: 163 - RNA, 23 nt, Homo sapiens
  source 1..23: mol_type = unassigned RNA
attatgatctttccttcttaaag

SEQ ID NO: 164 - RNA, 23 nt, Homo sapiens
  source 1..23: mol_type = unassigned RNA
tatgatctttccttcttaaagac

SEQ ID NO: 165 - RNA, 23 nt, Homo sapiens
  source 1..23: mol_type = unassigned RNA
gatctttccttcttaaagaccat

SEQ ID NO: 166 - RNA, 23 nt, Homo sapiens
  source 1..23: mol_type = unassigned RNA
ttccttcttaaagaccatccagg

SEQ ID NO: 167 - RNA, 23 nt, Homo sapiens
  source 1..23: mol_type = unassigned RNA
tccttcttaaagaccatccagga

SEQ ID NO: 168 - RNA, 23 nt, Homo sapiens
  source 1..23: mol_type = unassigned RNA
cttcttaaagaccatccaggagg

SEQ ID NO: 169 - RNA, 23 nt, Homo sapiens
  source 1..23: mol_type = unassigned RNA
tcttaaagaccatccaggaggtg

SEQ ID NO: 170 - RNA, 23 nt, Homo sapiens
  source 1..23: mol_type = unassigned RNA
cttaaagaccatccaggaggtgg

SEQ ID NO: 171 - RNA, 23 nt, Homo sapiens
  source 1..23: mol_type = unassigned RNA
atccaggaggtggctggttatgt

SEQ ID NO: 172 - RNA, 23 nt, Homo sapiens
  source 1..23: mol_type = unassigned RNA
tccaggaggtggctggttatgtc

SEQ ID NO: 173 - RNA, 23 nt, Homo sapiens
  source 1..23: mol_type = unassigned RNA
ccaggaggtggctggttatgtcc

SEQ ID NO: 174 - RNA, 23 nt, Homo sapiens
  source 1..23: mol_type = unassigned RNA
caggaggtggctggttatgtcct

SEQ ID NO: 175 - RNA, 23 nt, Homo sapiens
  source 1..23: mol_type = unassigned RNA
aggaggtggctggttatgtcctc

SEQ ID NO: 176 - RNA, 23 nt, Homo sapiens
  source 1..23: mol_type = unassigned RNA
ggaggtggctggttatgtcctca

SEQ ID NO: 177 - RNA, 23 nt, Homo sapiens
  source 1..23: mol_type = unassigned RNA
aggtggctggttatgtcctcatt

SEQ ID NO: 178 - RNA, 23 nt, Homo sapiens
  source 1..23: mol_type = unassigned RNA
ttgccctcaacacagtggagcga

SEQ ID NO: 179 - RNA, 23 nt, Homo sapiens
  source 1..23: mol_type = unassigned RNA
aattcctttggaaaacctgcaga

SEQ ID NO: 180 - RNA, 23 nt, Homo sapiens
  source 1..23: mol_type = unassigned RNA
attcctttggaaaacctgcagat

SEQ ID NO: 181 - RNA, 23 nt, Homo sapiens
  source 1..23: mol_type = unassigned RNA
tggaaaacctgcagatcatcaga

SEQ ID NO: 182 - RNA, 23 nt, Homo sapiens
  source 1..23: mol_type = unassigned RNA
ggaaaacctgcagatcatcagag

SEQ ID NO: 183 - RNA, 23 nt, Homo sapiens
  source 1..23: mol_type = unassigned RNA
aaaacctgcagatcatcagagga

SEQ ID NO: 184 - RNA, 23 nt, Homo sapiens
  source 1..23: mol_type = unassigned RNA
acctgcagatcatcagaggaaat

SEQ ID NO: 185 - RNA, 23 nt, Homo sapiens
  source 1..23: mol_type = unassigned RNA
acgaaaattcctatgccttagca

SEQ ID NO: 186 - RNA, 23 nt, Homo sapiens
  source 1..23: mol_type = unassigned RNA
cgaaaattcctatgccttagcag

SEQ ID NO: 187 - RNA, 23 nt, Homo sapiens
  source 1..23: mol_type = unassigned RNA
aaaattcctatgccttagcagtc

SEQ ID NO: 188 - RNA, 23 nt, Homo sapiens
  source 1..23: mol_type = unassigned RNA
attcctatgccttagcagtctta

SEQ ID NO: 189 - RNA, 23 nt, Homo sapiens
  source 1..23: mol_type = unassigned RNA
ttcctatgccttagcagtcttat

SEQ ID NO: 190 - RNA, 23 nt, Homo sapiens
  source 1..23: mol_type = unassigned RNA
tcctatgccttagcagtcttatc

SEQ ID NO: 191 - RNA, 23 nt, Homo sapiens
  source 1..23: mol_type = unassigned RNA
ctatgccttagcagtcttatcta

SEQ ID NO: 192 - RNA, 23 nt, Homo sapiens
  source 1..23: mol_type = unassigned RNA
tatgccttagcagtcttatctaa

SEQ ID NO: 193 - RNA, 23 nt, Homo sapiens
  source 1..23: mol_type = unassigned RNA
atgccttagcagtcttatctaac

SEQ ID NO: 194 - RNA, 23 nt, Homo sapiens
  source 1..23: mol_type = unassigned RNA
tgccttagcagtcttatctaact

SEQ ID NO: 195 - RNA, 23 nt, Homo sapiens
  source 1..23: mol_type = unassigned RNA
gccttagcagtcttatctaacta

SEQ ID NO: 196 - RNA, 23 nt, Homo sapiens
  source 1..23: mol_type = unassigned RNA
ccttagcagtcttatctaactat

SEQ ID NO: 197 - RNA, 23 nt, Homo sapiens
  source 1..23: mol_type = unassigned RNA
cttagcagtcttatctaactatg

SEQ ID NO: 198 - RNA, 23 nt, Homo sapiens
  source 1..23: mol_type = unassigned RNA
ttagcagtcttatctaactatga

SEQ ID NO: 199 - RNA, 23 nt, Homo sapiens
  source 1..23: mol_type = unassigned RNA
tagcagtcttatctaactatgat

SEQ ID NO: 200 - RNA, 23 nt, Homo sapiens
  source 1..23: mol_type = unassigned RNA
agcagtcttatctaactatgatg

SEQ ID NO: 201 - RNA, 23 nt, Homo sapiens
  source 1..23: mol_type = unassigned RNA
agtcttatctaactatgatgcaa

SEQ ID NO: 202 - RNA, 23 nt, Homo sapiens
  source 1..23: mol_type = unassigned RNA
gtcttatctaactatgatgcaaa

SEQ ID NO: 203 - RNA, 23 nt, Homo sapiens
  source 1..23: mol_type = unassigned RNA
tcttatctaactatgatgcaaat

SEQ ID NO: 204 - RNA, 23 nt, Homo sapiens
  source 1..23: mol_type = unassigned RNA
cttatctaactatgatgcaaata

SEQ ID NO: 205 - RNA, 23 nt, Homo sapiens
  source 1..23: mol_type = unassigned RNA
ttatctaactatgatgcaaataa

SEQ ID NO: 206 - RNA, 23 nt, Homo sapiens
  source 1..23: mol_type = unassigned RNA
tatctaactatgatgcaaataaa

SEQ ID NO: 207 - RNA, 23 nt, Homo sapiens
  source 1..23: mol_type = unassigned RNA
atctaactatgatgcaaataaaa

SEQ ID NO: 208 - RNA, 23 nt, Homo sapiens
  source 1..23: mol_type = unassigned RNA
ctaactatgatgcaaataaaacc

SEQ ID NO: 209 - RNA, 23 nt, Homo sapiens
  source 1..23: mol_type = unassigned RNA
atgatgcaaataaaaccggactg

SEQ ID NO: 210 - RNA, 23 nt, Homo sapiens
  source 1..23: mol_type = unassigned RNA
tgatgcaaataaaaccggactga

SEQ ID NO: 211 - RNA, 23 nt, Homo sapiens
  source 1..23: mol_type = unassigned RNA
gatgcaaataaaaccggactgaa

SEQ ID NO: 212 - RNA, 23 nt, Homo sapiens
  source 1..23: mol_type = unassigned RNA
tgcaaataaaaccggactgaagg

SEQ ID NO: 213 - RNA, 23 nt, Homo sapiens
  source 1..23: mol_type = unassigned RNA
gcaaataaaaccggactgaagga

SEQ ID NO: 214 - RNA, 23 nt, Homo sapiens
  source 1..23: mol_type = unassigned RNA
caaataaaaccggactgaaggag

SEQ ID NO: 215 - RNA, 23 nt, Homo sapiens
  source 1..23: mol_type = unassigned RNA
aataaaaccggactgaaggagct

SEQ ID NO: 216 - RNA, 23 nt, Homo sapiens
  source 1..23: mol_type = unassigned RNA
ataaaaccggactgaaggagctg

SEQ ID NO: 217 - RNA, 23 nt, Homo sapiens
  source 1..23: mol_type = unassigned RNA
taaaaccggactgaaggagctgc

SEQ ID NO: 218 - RNA, 23 nt, Homo sapiens
  source 1..23: mol_type = unassigned RNA
aaaaccggactgaaggagctgcc

SEQ ID NO: 219 - RNA, 23 nt, Homo sapiens
  source 1..23: mol_type = unassigned RNA
gaaggagctgcccatgagaaatt

SEQ ID NO: 220 - RNA, 23 nt, Homo sapiens
  source 1..23: mol_type = unassigned RNA
tttacaggaaatcctgcatggcg

SEQ ID NO: 221 - RNA, 23 nt, Homo sapiens
  source 1..23: mol_type = unassigned RNA
acaggaaatcctgcatggcgccg

SEQ ID NO: 222 - RNA, 23 nt, Homo sapiens
  source 1..23: mol_type = unassigned RNA
caggaaatcctgcatggcgccgt

SEQ ID NO: 223 - RNA, 23 nt, Homo sapiens
  source 1..23: mol_type = unassigned RNA
aggaaatcctgcatggcgccgtg

SEQ ID NO: 224 - RNA, 23 nt, Homo sapiens
  source 1..23: mol_type = unassigned RNA
ggaaatcctgcatggcgccgtgc

SEQ ID NO: 225 - RNA, 23 nt, Homo sapiens
  source 1..23: mol_type = unassigned RNA
gaaatcctgcatggcgccgtgcg

SEQ ID NO: 226 - RNA, 23 nt, Homo sapiens
  source 1..23: mol_type = unassigned RNA
aatcctgcatggcgccgtgcggt

SEQ ID NO: 227 - RNA, 23 nt, Homo sapiens
  source 1..23: mol_type = unassigned RNA
tcctgcatggcgccgtgcggttc

SEQ ID NO: 228 - RNA, 23 nt, Homo sapiens
  source 1..23: mol_type = unassigned RNA
cctgcatggcgccgtgcggttca

SEQ ID NO: 229 - RNA, 23 nt, Homo sapiens
  source 1..23: mol_type = unassigned RNA
ctgcatggcgccgtgcggttcag

SEQ ID NO: 230 - RNA, 23 nt, Homo sapiens
  source 1..23: mol_type = unassigned RNA
gcatggcgccgtgcggttcagca

SEQ ID NO: 231 - RNA, 23 nt, Homo sapiens
  source 1..23: mol_type = unassigned RNA
catggcgccgtgcggttcagcaa

SEQ ID NO: 232 - RNA, 23 nt, Homo sapiens
  source 1..23: mol_type = unassigned RNA
atggcgccgtgcggttcagcaac

SEQ ID NO: 233 - RNA, 23 nt, Homo sapiens
  source 1..23: mol_type = unassigned RNA
tggcgccgtgcggttcagcaaca

SEQ ID NO: 234 - RNA, 23 nt, Homo sapiens
  source 1..23: mol_type = unassigned RNA
ggcgccgtgcggttcagcaacaa

SEQ ID NO: 235 - RNA, 23 nt, Homo sapiens
  source 1..23: mol_type = unassigned RNA
gcgccgtgcggttcagcaacaac

SEQ ID NO: 236 - RNA, 23 nt, Homo sapiens
  source 1..23: mol_type = unassigned RNA
cgccgtgcggttcagcaacaacc

SEQ ID NO: 237 - RNA, 23 nt, Homo sapiens
  source 1..23: mol_type = unassigned RNA
ccgtgcggttcagcaacaaccct

SEQ ID NO: 238 - RNA, 23 nt, Homo sapiens
  source 1..23: mol_type = unassigned RNA
gtgcggttcagcaacaaccctgc

SEQ ID NO: 239 - RNA, 23 nt, Homo sapiens
  source 1..23: mol_type = unassigned RNA
gcggttcagcaacaaccctgccc

SEQ ID NO: 240 - RNA, 23 nt, Homo sapiens
  source 1..23: mol_type = unassigned RNA
cagcaacaaccctgccctgtgca

SEQ ID NO: 241 - RNA, 23 nt, Homo sapiens
  source 1..23: mol_type = unassigned RNA
gcaacaaccctgccctgtgcaac

SEQ ID NO: 242 - RNA, 23 nt, Homo sapiens
  source 1..23: mol_type = unassigned RNA
caacgtggagagcatccagtggc

SEQ ID NO: 243 - RNA, 23 nt, Homo sapiens
  source 1..23: mol_type = unassigned RNA
aacgtggagagcatccagtggcg

SEQ ID NO: 244 - RNA, 23 nt, Homo sapiens
  source 1..23: mol_type = unassigned RNA
acgtggagagcatccagtggcgg

SEQ ID NO: 245 - RNA, 23 nt, Homo sapiens
  source 1..23: mol_type = unassigned RNA
tggagagcatccagtggcgggac

SEQ ID NO: 246 - RNA, 23 nt, Homo sapiens
  source 1..23: mol_type = unassigned RNA
ggagagcatccagtggcgggaca

SEQ ID NO: 247 - RNA, 23 nt, Homo sapiens
  source 1..23: mol_type = unassigned RNA
gagagcatccagtggcgggacat

SEQ ID NO: 248 - RNA, 23 nt, Homo sapiens
  source 1..23: mol_type = unassigned RNA
tccagtggcgggacatagtcagc

SEQ ID NO: 249 - RNA, 23 nt, Homo sapiens
  source 1..23: mol_type = unassigned RNA
ccagtggcgggacatagtcagca

SEQ ID NO: 250 - RNA, 23 nt, Homo sapiens
  source 1..23: mol_type = unassigned RNA
agtggcgggacatagtcagcagt

SEQ ID NO: 251 - RNA, 23 nt, Homo sapiens
  source 1..23: mol_type = unassigned RNA
gtggcgggacatagtcagcagtg

SEQ ID NO: 252 - RNA, 23 nt, Homo sapiens
  source 1..23: mol_type = unassigned RNA
ttctcagcaacatgtcgatggac

SEQ ID NO: 253 - RNA, 23 nt, Homo sapiens
  source 1..23: mol_type = unassigned RNA
ctcagcaacatgtcgatggactt

SEQ ID NO: 254 - RNA, 23 nt, Homo sapiens
  source 1..23: mol_type = unassigned RNA
tcagcaacatgtcgatggacttc

SEQ ID NO: 255 - RNA, 23 nt, Homo sapiens
  source 1..23: mol_type = unassigned RNA
cagcaacatgtcgatggacttcc

SEQ ID NO: 256 - RNA, 23 nt, Homo sapiens
  source 1..23: mol_type = unassigned RNA
gcaacatgtcgatggacttccag

SEQ ID NO: 257 - RNA, 23 nt, Homo sapiens
  source 1..23: mol_type = unassigned RNA
caacatgtcgatggacttccaga

SEQ ID NO: 258 - RNA, 23 nt, Homo sapiens
  source 1..23: mol_type = unassigned RNA
aacatgtcgatggacttccagaa

SEQ ID NO: 259 - RNA, 23 nt, Homo sapiens
  source 1..23: mol_type = unassigned RNA
acatgtcgatggacttccagaac

SEQ ID NO: 260 - RNA, 23 nt, Homo sapiens
  source 1..23: mol_type = unassigned RNA
tgtcgatggacttccagaaccac

SEQ ID NO: 261 - RNA, 23 nt, Homo sapiens
  source 1..23: mol_type = unassigned RNA
cagaaccacctgggcagctgcca

SEQ ID NO: 262 - RNA, 23 nt, Homo sapiens
  source 1..23: mol_type = unassigned RNA
ctgggcagctgccaaaagtgtga

SEQ ID NO: 263 - RNA, 23 nt, Homo sapiens
  source 1..23: mol_type = unassigned RNA
gggcagctgccaaaagtgtgatc

SEQ ID NO: 264 - RNA, 23 nt, Homo sapiens
  source 1..23: mol_type = unassigned RNA
gctgccaaaagtgtgatccaagc

SEQ ID NO: 265 - RNA, 23 nt, Homo sapiens
  source 1..23: mol_type = unassigned RNA
ctgccaaaagtgtgatccaagct

SEQ ID NO: 266 - RNA, 23 nt, Homo sapiens
  source 1..23: mol_type = unassigned RNA
tgccaaaagtgtgatccaagctg

SEQ ID NO: 267 - RNA, 23 nt, Homo sapiens
  source 1..23: mol_type = unassigned RNA
caaaagtgtgatccaagctgtcc

SEQ ID NO: 268 - RNA, 23 nt, Homo sapiens
  source 1..23: mol_type = unassigned RNA
agtgtgatccaagctgtcccaat

SEQ ID NO: 269 - RNA, 23 nt, Homo sapiens
  source 1..23: mol_type = unassigned RNA
gtgtgatccaagctgtcccaatg

SEQ ID NO: 270 - RNA, 23 nt, Homo sapiens
  source 1..23: mol_type = unassigned RNA
gtgatccaagctgtcccaatggg

SEQ ID NO: 271 - RNA, 23 nt, Homo sapiens
  source 1..23: mol_type = unassigned RNA
tgatccaagctgtcccaatggga

SEQ ID NO: 272 - RNA, 23 nt, Homo sapiens
  source 1..23: mol_type = unassigned RNA
gatccaagctgtcccaatgggag

SEQ ID NO: 273 - RNA, 23 nt, Homo sapiens
  source 1..23: mol_type = unassigned RNA
atccaagctgtcccaatgggagc

SEQ ID NO: 274 - RNA, 23 nt, Homo sapiens
  source 1..23: mol_type = unassigned RNA
tccaagctgtcccaatgggagct

SEQ ID NO: 275 - RNA, 23 nt, Homo sapiens
  source 1..23: mol_type = unassigned RNA
caagctgtcccaatgggagctgc

SEQ ID NO: 276 - RNA, 23 nt, Homo sapiens
  source 1..23: mol_type = unassigned RNA
gctgtcccaatgggagctgctgg

SEQ ID NO: 277 - RNA, 23 nt, Homo sapiens
  source 1..23: mol_type = unassigned RNA
ggggtgcaggagaggagaactgc

SEQ ID NO: 278 - RNA, 23 nt, Homo sapiens
  source 1..23: mol_type = unassigned RNA
agaaactgaccaaaatcatctgt

SEQ ID NO: 279 - RNA, 23 nt, Homo sapiens
  source 1..23: mol_type = unassigned RNA
gaaactgaccaaaatcatctgtg

SEQ ID NO: 280 - RNA, 23 nt, Homo sapiens
  source 1..23: mol_type = unassigned RNA
aaactgaccaaaatcatctgtgc

SEQ ID NO: 281 - RNA, 23 nt, Homo sapiens
  source 1..23: mol_type = unassigned RNA
tgaccaaaatcatctgtgcccag

SEQ ID NO: 282 - RNA, 23 nt, Homo sapiens
  source 1..23: mol_type = unassigned RNA
gaccaaaatcatctgtgcccagc

SEQ ID NO: 283 - RNA, 23 nt, Homo sapiens
  source 1..23: mol_type = unassigned RNA
caaaatcatctgtgcccagcagt

SEQ ID NO: 284 - RNA, 23 nt, Homo sapiens
  source 1..23: mol_type = unassigned RNA
ctgtgcccagcagtgctccgggc

SEQ ID NO: 285 - RNA, 23 nt, Homo sapiens
  source 1..23: mol_type = unassigned RNA
gtgcccagcagtgctccgggcgc

SEQ ID NO: 286 - RNA, 23 nt, Homo sapiens
  source 1..23: mol_type = unassigned RNA
ccccagtgactgctgccacaacc

SEQ ID NO: 287 - RNA, 23 nt, Homo sapiens
  source 1..23: mol_type = unassigned RNA
cccagtgactgctgccacaacca

SEQ ID NO: 288 - RNA, 23 nt, Homo sapiens
  source 1..23: mol_type = unassigned RNA
gggagagcgactgcctggtctgc

SEQ ID NO: 289 - RNA, 23 nt, Homo sapiens
  source 1..23: mol_type = unassigned RNA
ggagagcgactgcctggtctgcc

SEQ ID NO: 290 - RNA, 23 nt, Homo sapiens
  source 1..23: mol_type = unassigned RNA
gagagcgactgcctggtctgccg

SEQ ID NO: 291 - RNA, 23 nt, Homo sapiens
  source 1..23: mol_type = unassigned RNA
agagcgactgcctggtctgccgc

SEQ ID NO: 292 - RNA, 23 nt, Homo sapiens
  source 1..23: mol_type = unassigned RNA
gagcgactgcctggtctgccgca

SEQ ID NO: 293 - RNA, 23 nt, Homo sapiens
  source 1..23: mol_type = unassigned RNA
agcgactgcctggtctgccgcaa

SEQ ID NO: 294 - RNA, 23 nt, Homo sapiens
  source 1..23: mol_type = unassigned RNA
ctgcctggtctgccgcaaattcc

SEQ ID NO: 295 - RNA, 23 nt, Homo sapiens
  source 1..23: mol_type = unassigned RNA
tgcctggtctgccgcaaattccg

SEQ ID NO: 296 - RNA, 23 nt, Homo sapiens
  source 1..23: mol_type = unassigned RNA
gcctggtctgccgcaaattccga

SEQ ID NO: 297 - RNA, 23 nt, Homo sapiens
  source 1..23: mol_type = unassigned RNA
cctggtctgccgcaaattccgag

SEQ ID NO: 298 - RNA, 23 nt, Homo sapiens
  source 1..23: mol_type = unassigned RNA
tggtctgccgcaaattccgagac

SEQ ID NO: 299 - RNA, 23 nt, Homo sapiens
  source 1..23: mol_type = unassigned RNA
ggtctgccgcaaattccgagacg

SEQ ID NO: 300 - RNA, 23 nt, Homo sapiens
  source 1..23: mol_type = unassigned RNA
gtctgccgcaaattccgagacga

SEQ ID NO: 301 - RNA, 23 nt, Homo sapiens
  source 1..23: mol_type = unassigned RNA
tctgccgcaaattccgagacgaa

SEQ ID NO: 302 - RNA, 23 nt, Homo sapiens
  source 1..23: mol_type = unassigned RNA
tgccgcaaattccgagacgaagc

SEQ ID NO: 303 - RNA, 23 nt, Homo sapiens
  source 1..23: mol_type = unassigned RNA
caaattccgagacgaagccacgt

SEQ ID NO: 304 - RNA, 23 nt, Homo sapiens
  source 1..23: mol_type = unassigned RNA
aaattccgagacgaagccacgtg

SEQ ID NO: 305 - RNA, 23 nt, Homo sapiens
  source 1..23: mol_type = unassigned RNA
aattccgagacgaagccacgtgc

SEQ ID NO: 306 - RNA, 23 nt, Homo sapiens
  source 1..23: mol_type = unassigned RNA
attccgagacgaagccacgtgca

SEQ ID NO: 307 - RNA, 23 nt, Homo sapiens
  source 1..23: mol_type = unassigned RNA
ttccgagacgaagccacgtgcaa

SEQ ID NO: 308 - RNA, 23 nt, Homo sapiens
  source 1..23: mol_type = unassigned RNA
ccgagacgaagccacgtgcaagg

SEQ ID NO: 309 - RNA, 23 nt, Homo sapiens
  source 1..23: mol_type = unassigned RNA
agacgaagccacgtgcaaggaca

SEQ ID NO: 310 - RNA, 23 nt, Homo sapiens
  source 1..23: mol_type = unassigned RNA
gacgaagccacgtgcaaggacac

SEQ ID NO: 311 - RNA, 23 nt, Homo sapiens
  source 1..23: mol_type = unassigned RNA
acgaagccacgtgcaaggacacc

SEQ ID NO: 312 - RNA, 23 nt, Homo sapiens
  source 1..23: mol_type = unassigned RNA
cgaagccacgtgcaaggacacct

SEQ ID NO: 313 - RNA, 23 nt, Homo sapiens
  source 1..23: mol_type = unassigned RNA
ccccccactcatgctctacaacc

SEQ ID NO: 314 - RNA, 23 nt, Homo sapiens
  source 1..23: mol_type = unassigned RNA
ccccactcatgctctacaacccc

SEQ ID NO: 315 - RNA, 23 nt, Homo sapiens
  source 1..23: mol_type = unassigned RNA
ccactcatgctctacaaccccac

SEQ ID NO: 316 - RNA, 23 nt, Homo sapiens
  source 1..23: mol_type = unassigned RNA
ctcatgctctacaaccccaccac

SEQ ID NO: 317 - RNA, 23 nt, Homo sapiens
  source 1..23: mol_type = unassigned RNA
taccagatggatgtgaaccccga

SEQ ID NO: 318 - RNA, 23 nt, Homo sapiens
  source 1..23: mol_type = unassigned RNA
ccagatggatgtgaaccccgagg

SEQ ID NO: 319 - RNA, 23 nt, Homo sapiens
  source 1..23: mol_type = unassigned RNA
cagatggatgtgaaccccgaggg

SEQ ID NO: 320 - RNA, 23 nt, Homo sapiens
  source 1..23: mol_type = unassigned RNA
agatggatgtgaaccccgagggc

SEQ ID NO: 321 - RNA, 23 nt, Homo sapiens
  source 1..23: mol_type = unassigned RNA
atggatgtgaaccccgagggcaa

SEQ ID NO: 322 - RNA, 23 nt, Homo sapiens
  source 1..23: mol_type = unassigned RNA
tggatgtgaaccccgagggcaaa

SEQ ID NO: 323 - RNA, 23 nt, Homo sapiens
  source 1..23: mol_type = unassigned RNA
gatgtgaaccccgagggcaaata

SEQ ID NO: 324 - RNA, 23 nt, Homo sapiens
  source 1..23: mol_type = unassigned RNA
tgaaccccgagggcaaatacagc

SEQ ID NO: 325 - RNA, 23 nt, Homo sapiens
  source 1..23: mol_type = unassigned RNA
gaaccccgagggcaaatacagct

SEQ ID NO: 326 - RNA, 23 nt, Homo sapiens
  source 1..23: mol_type = unassigned RNA
accccgagggcaaatacagcttt

SEQ ID NO: 327 - RNA, 23 nt, Homo sapiens
  source 1..23: mol_type = unassigned RNA
ccccgagggcaaatacagctttg

SEQ ID NO: 328 - RNA, 23 nt, Homo sapiens
  source 1..23: mol_type = unassigned RNA
cccgagggcaaatacagctttgg

SEQ ID NO: 329 - RNA, 23 nt, Homo sapiens
  source 1..23: mol_type = unassigned RNA
gcaaatacagctttggtgccacc

SEQ ID NO: 330 - RNA, 23 nt, Homo sapiens
  source 1..23: mol_type = unassigned RNA
caaatacagctttggtgccacct

SEQ ID NO: 331 - RNA, 23 nt, Homo sapiens
  source 1..23: mol_type = unassigned RNA
aaatacagctttggtgccacctg

SEQ ID NO: 332 - RNA, 23 nt, Homo sapiens
  source 1..23: mol_type = unassigned RNA
agctttggtgccacctgcgtgaa

SEQ ID NO: 333 - RNA, 23 nt, Homo sapiens
  source 1..23: mol_type = unassigned RNA
ctttggtgccacctgcgtgaaga

SEQ ID NO: 334 - RNA, 23 nt, Homo sapiens
  source 1..23: mol_type = unassigned RNA
tgccacctgcgtgaagaagtgtc

SEQ ID NO: 335 - RNA, 23 nt, Homo sapiens
  source 1..23: mol_type = unassigned RNA
acctgcgtgaagaagtgtccccg

SEQ ID NO: 336 - RNA, 23 nt, Homo sapiens
  source 1..23: mol_type = unassigned RNA
cctgcgtgaagaagtgtccccgt

SEQ ID NO: 337 - RNA, 23 nt, Homo sapiens
  source 1..23: mol_type = unassigned RNA
ctgcgtgaagaagtgtccccgta

SEQ ID NO: 338 - RNA, 23 nt, Homo sapiens
  source 1..23: mol_type = unassigned RNA
tgcgtgaagaagtgtccccgtaa

SEQ ID NO: 339 - RNA, 23 nt, Homo sapiens
  source 1..23: mol_type = unassigned RNA
gcgtgaagaagtgtccccgtaat

SEQ ID NO: 340 - RNA, 23 nt, Homo sapiens
  source 1..23: mol_type = unassigned RNA
cgtgaagaagtgtccccgtaatt

SEQ ID NO: 341 - RNA, 23 nt, Homo sapiens
  source 1..23: mol_type = unassigned RNA
gtgaagaagtgtccccgtaatta

SEQ ID NO: 342 - RNA, 23 nt, Homo sapiens
  source 1..23: mol_type = unassigned RNA
tgaagaagtgtccccgtaattat

SEQ ID NO: 343 - RNA, 23 nt, Homo sapiens
  source 1..23: mol_type = unassigned RNA
gaagaagtgtccccgtaattatg

SEQ ID NO: 344 - RNA, 23 nt, Homo sapiens
  source 1..23: mol_type = unassigned RNA
aagaagtgtccccgtaattatgt

SEQ ID NO: 345 - RNA, 23 nt, Homo sapiens
  source 1..23: mol_type = unassigned RNA
agaagtgtccccgtaattatgtg

SEQ ID NO: 346 - RNA, 23 nt, Homo sapiens
  source 1..23: mol_type = unassigned RNA
gaagtgtccccgtaattatgtgg

SEQ ID NO: 347 - RNA, 23 nt, Homo sapiens
  source 1..23: mol_type = unassigned RNA
aagtgtccccgtaattatgtggt

SEQ ID NO: 348 - RNA, 23 nt, Homo sapiens
  source 1..23: mol_type = unassigned RNA
agtgtccccgtaattatgtggtg

SEQ ID NO: 349 - RNA, 23 nt, Homo sapiens
  source 1..23: mol_type = unassigned RNA
gtgtccccgtaattatgtggtga

SEQ ID NO: 350 - RNA, 23 nt, Homo sapiens
  source 1..23: mol_type = unassigned RNA
gtccccgtaattatgtggtgaca

SEQ ID NO: 351 - RNA, 23 nt, Homo sapiens
  source 1..23: mol_type = unassigned RNA
ccccgtaattatgtggtgacaga

SEQ ID NO: 352 - RNA, 23 nt, Homo sapiens
  source 1..23: mol_type = unassigned RNA
ccgtaattatgtggtgacagatc

SEQ ID NO: 353 - RNA, 23 nt, Homo sapiens
  source 1..23: mol_type = unassigned RNA
cgtaattatgtggtgacagatca

SEQ ID NO: 354 - RNA, 23 nt, Homo sapiens
  source 1..23: mol_type = unassigned RNA
gtaattatgtggtgacagatcac

SEQ ID NO: 355 - RNA, 23 nt, Homo sapiens
  source 1..23: mol_type = unassigned RNA
taattatgtggtgacagatcacg

SEQ ID NO: 356 - RNA, 23 nt, Homo sapiens
  source 1..23: mol_type = unassigned RNA
aattatgtggtgacagatcacgg

SEQ ID NO: 357 - RNA, 23 nt, Homo sapiens
  source 1..23: mol_type = unassigned RNA
ttatgtggtgacagatcacggct

SEQ ID NO: 358 - RNA, 23 nt, Homo sapiens
  source 1..23: mol_type = unassigned RNA
tgtggtgacagatcacggctcgt

SEQ ID NO: 359 - RNA, 23 nt, Homo sapiens
  source 1..23: mol_type = unassigned RNA
tggtgacagatcacggctcgtgc

SEQ ID NO: 360 - RNA, 23 nt, Homo sapiens
  source 1..23: mol_type = unassigned RNA
ggtgacagatcacggctcgtgcg

SEQ ID NO: 361 - RNA, 23 nt, Homo sapiens
  source 1..23: mol_type = unassigned RNA
gtgacagatcacggctcgtgcgt

SEQ ID NO: 362 - RNA, 23 nt, Homo sapiens
  source 1..23: mol_type = unassigned RNA
tgacagatcacggctcgtgcgtc

SEQ ID NO: 363 - RNA, 23 nt, Homo sapiens
  source 1..23: mol_type = unassigned RNA
gacagatcacggctcgtgcgtcc

SEQ ID NO: 364 - RNA, 23 nt, Homo sapiens
  source 1..23: mol_type = unassigned RNA
acagatcacggctcgtgcgtccg

SEQ ID NO: 365 - RNA, 23 nt, Homo sapiens
  source 1..23: mol_type = unassigned RNA
cagatcacggctcgtgcgtccga

SEQ ID NO: 366 - RNA, 23 nt, Homo sapiens
  source 1..23: mol_type = unassigned RNA
agatcacggctcgtgcgtccgag

SEQ ID NO: 367 - RNA, 23 nt, Homo sapiens
  source 1..23: mol_type = unassigned RNA
gatcacggctcgtgcgtccgagc

SEQ ID NO: 368 - RNA, 23 nt, Homo sapiens
  source 1..23: mol_type = unassigned RNA
atcacggctcgtgcgtccgagcc

SEQ ID NO: 369 - RNA, 23 nt, Homo sapiens
  source 1..23: mol_type = unassigned RNA
tcacggctcgtgcgtccgagcct

SEQ ID NO: 370 - RNA, 23 nt, Homo sapiens
  source 1..23: mol_type = unassigned RNA
cggctcgtgcgtccgagcctgtg

SEQ ID NO: 371 - RNA, 23 nt, Homo sapiens
  source 1..23: mol_type = unassigned RNA
atggaggaagacggcgtccgcaa

SEQ ID NO: 372 - RNA, 23 nt, Homo sapiens
  source 1..23: mol_type = unassigned RNA
tggaggaagacggcgtccgcaag

SEQ ID NO: 373 - RNA, 23 nt, Homo sapiens
  source 1..23: mol_type = unassigned RNA
gaggaagacggcgtccgcaagtg

SEQ ID NO: 374 - RNA, 23 nt, Homo sapiens
  source 1..23: mol_type = unassigned RNA
aggaagacggcgtccgcaagtgt

SEQ ID NO: 375 - RNA, 23 nt, Homo sapiens
  source 1..23: mol_type = unassigned RNA
ggaagacggcgtccgcaagtgta

SEQ ID NO: 376 - RNA, 23 nt, Homo sapiens
  source 1..23: mol_type = unassigned RNA
aagacggcgtccgcaagtgtaag

SEQ ID NO: 377 - RNA, 23 nt, Homo sapiens
  source 1..23: mol_type = unassigned RNA
agacggcgtccgcaagtgtaaga

SEQ ID NO: 378 - RNA, 23 nt, Homo sapiens
  source 1..23: mol_type = unassigned RNA
cggcgtccgcaagtgtaagaagt

SEQ ID NO: 379 - RNA, 23 nt, Homo sapiens
  source 1..23: mol_type = unassigned RNA
ggcgtccgcaagtgtaagaagtg

SEQ ID NO: 380 - RNA, 23 nt, Homo sapiens
  source 1..23: mol_type = unassigned RNA
gcgtccgcaagtgtaagaagtgc

SEQ ID NO: 381 - RNA, 23 nt, Homo sapiens
  source 1..23: mol_type = unassigned RNA
cgtccgcaagtgtaagaagtgcg

SEQ ID NO: 382 - RNA, 23 nt, Homo sapiens
  source 1..23: mol_type = unassigned RNA
gtccgcaagtgtaagaagtgcga

SEQ ID NO: 383 - RNA, 23 nt, Homo sapiens
  source 1..23: mol_type = unassigned RNA
tccgcaagtgtaagaagtgcgaa

SEQ ID NO: 384 - RNA, 23 nt, Homo sapiens
  source 1..23: mol_type = unassigned RNA
ccgcaagtgtaagaagtgcgaag

SEQ ID NO: 385 - RNA, 23 nt, Homo sapiens
  source 1..23: mol_type = unassigned RNA
gcaagtgtaagaagtgcgaaggg

SEQ ID NO: 386 - RNA, 23 nt, Homo sapiens
  source 1..23: mol_type = unassigned RNA
caagtgtaagaagtgcgaagggc

SEQ ID NO: 387 - RNA, 23 nt, Homo sapiens
  source 1..23: mol_type = unassigned RNA
aagtgtaagaagtgcgaagggcc

SEQ ID NO: 388 - RNA, 23 nt, Homo sapiens
  source 1..23: mol_type = unassigned RNA
agtgtaagaagtgcgaagggcct

SEQ ID NO: 389 - RNA, 23 nt, Homo sapiens
  source 1..23: mol_type = unassigned RNA
gtgtaagaagtgcgaagggcctt

SEQ ID NO: 390 - RNA, 23 nt, Homo sapiens
  source 1..23: mol_type = unassigned RNA
tgtaagaagtgcgaagggccttg

SEQ ID NO: 391 - RNA, 23 nt, Homo sapiens
  source 1..23: mol_type = unassigned RNA
gtaagaagtgcgaagggccttgc

SEQ ID NO: 392 - RNA, 23 nt, Homo sapiens
  source 1..23: mol_type = unassigned RNA
taagaagtgcgaagggccttgcc

SEQ ID NO: 393 - RNA, 23 nt, Homo sapiens
  source 1..23: mol_type = unassigned RNA
gaagtgcgaagggccttgccgca

SEQ ID NO: 394 - RNA, 23 nt, Homo sapiens
  source 1..23: mol_type = unassigned RNA
aagtgcgaagggccttgccgcaa

SEQ ID NO: 395 - RNA, 23 nt, Homo sapiens
  source 1..23: mol_type = unassigned RNA
agtgcgaagggccttgccgcaaa

SEQ ID NO: 396 - RNA, 23 nt, Homo sapiens
  source 1..23: mol_type = unassigned RNA
gtgcgaagggccttgccgcaaag

SEQ ID NO: 397 - RNA, 23 nt, Homo sapiens
  source 1..23: mol_type = unassigned RNA
tgcgaagggccttgccgcaaagt

SEQ ID NO: 398 - RNA, 23 nt, Homo sapiens
  source 1..23: mol_type = unassigned RNA
cgaagggccttgccgcaaagtgt

SEQ ID NO: 399 - RNA, 23 nt, Homo sapiens
  source 1..23: mol_type = unassigned RNA
gaagggccttgccgcaaagtgtg

SEQ ID NO: 400 - RNA, 23 nt, Homo sapiens
  source 1..23: mol_type = unassigned RNA
aagggccttgccgcaaagtgtgt

SEQ ID NO: 401 - RNA, 23 nt, Homo sapiens
  source 1..23: mol_type = unassigned RNA
agggccttgccgcaaagtgtgta

SEQ ID NO: 402 - RNA, 23 nt, Homo sapiens
  source 1..23: mol_type = unassigned RNA
gggccttgccgcaaagtgtgtaa

SEQ ID NO: 403 - RNA, 23 nt, Homo sapiens
  source 1..23: mol_type = unassigned RNA
gccttgccgcaaagtgtgtaacg

SEQ ID NO: 404 - RNA, 23 nt, Homo sapiens
  source 1..23: mol_type = unassigned RNA
acggaataggtattggtgaattt

SEQ ID NO: 405 - RNA, 23 nt, Homo sapiens
  source 1..23: mol_type = unassigned RNA
cggaataggtattggtgaattta

SEQ ID NO: 406 - RNA, 23 nt, Homo sapiens
  source 1..23: mol_type = unassigned RNA
ggaataggtattggtgaatttaa

SEQ ID NO: 407 - RNA, 23 nt, Homo sapiens
  source 1..23: mol_type = unassigned RNA
gaataggtattggtgaatttaaa

SEQ ID NO: 408 - RNA, 23 nt, Homo sapiens
  source 1..23: mol_type = unassigned RNA
ataggtattggtgaatttaaaga

SEQ ID NO: 409 - RNA, 23 nt, Homo sapiens
  source 1..23: mol_type = unassigned RNA
taggtattggtgaatttaaagac

SEQ ID NO: 410 - RNA, 23 nt, Homo sapiens
  source 1..23: mol_type = unassigned RNA
ctcactctccataaatgctacga

SEQ ID NO: 411 - RNA, 23 nt, Homo sapiens
  source 1..23: mol_type = unassigned RNA
tattaaacacttcaaaaactgca

SEQ ID NO: 412 - RNA, 23 nt, Homo sapiens
  source 1..23: mol_type = unassigned RNA
cacttcaaaaactgcacctccat

SEQ ID NO: 413 - RNA, 23 nt, Homo sapiens
  source 1..23: mol_type = unassigned RNA
acttcaaaaactgcacctccatc

SEQ ID NO: 414 - RNA, 23 nt, Homo sapiens
  source 1..23: mol_type = unassigned RNA
cttcaaaaactgcacctccatca

SEQ ID NO: 415 - RNA, 23 nt, Homo sapiens
  source 1..23: mol_type = unassigned RNA
ttcaaaaactgcacctccatcag

SEQ ID NO: 416 - RNA, 23 nt, Homo sapiens
  source 1..23: mol_type = unassigned RNA
tcaaaaactgcacctccatcagt

SEQ ID NO: 417 - RNA, 23 nt, Homo sapiens
  source 1..23: mol_type = unassigned RNA
aaactgcacctccatcagtggcg

SEQ ID NO: 418 - RNA, 23 nt, Homo sapiens
  source 1..23: mol_type = unassigned RNA
tgcacctccatcagtggcgatct

SEQ ID NO: 419 - RNA, 23 nt, Homo sapiens
  source 1..23: mol_type = unassigned RNA
gcacctccatcagtggcgatctc

SEQ ID NO: 420 - RNA, 23 nt, Homo sapiens
  source 1..23: mol_type = unassigned RNA
acctccatcagtggcgatctcca

SEQ ID NO: 421 - RNA, 23 nt, Homo sapiens
  source 1..23: mol_type = unassigned RNA
tccatcagtggcgatctccacat

SEQ ID NO: 422 - RNA, 23 nt, Homo sapiens
  source 1..23: mol_type = unassigned RNA
agtggcgatctccacatcctgcc

SEQ ID NO: 423 - RNA, 23 nt, Homo sapiens
  source 1..23: mol_type = unassigned RNA
gtggcgatctccacatcctgccg

SEQ ID NO: 424 - RNA, 23 nt, Homo sapiens
  source 1..23: mol_type = unassigned RNA
tggcgatctccacatcctgccgg

SEQ ID NO: 425 - RNA, 23 nt, Homo sapiens
  source 1..23: mol_type = unassigned RNA
ggcgatctccacatcctgccggt

SEQ ID NO: 426 - RNA, 23 nt, Homo sapiens
  source 1..23: mol_type = unassigned RNA
gcgatctccacatcctgccggtg

SEQ ID NO: 427 - RNA, 23 nt, Homo sapiens
  source 1..23: mol_type = unassigned RNA
ctccacatcctgccggtggcatt

SEQ ID NO: 428 - RNA, 23 nt, Homo sapiens
  source 1..23: mol_type = unassigned RNA
tccacatcctgccggtggcattt

SEQ ID NO: 429 - RNA, 23 nt, Homo sapiens
  source 1..23: mol_type = unassigned RNA
ccacatcctgccggtggcattta

SEQ ID NO: 430 - RNA, 23 nt, Homo sapiens
  source 1..23: mol_type = unassigned RNA
acatcctgccggtggcatttagg

SEQ ID NO: 431 - RNA, 23 nt, Homo sapiens
  source 1..23: mol_type = unassigned RNA
tcctgccggtggcatttaggggt

SEQ ID NO: 432 - RNA, 23 nt, Homo sapiens
  source 1..23: mol_type = unassigned RNA
cctgccggtggcatttaggggtg

SEQ ID NO: 433 - RNA, 23 nt, Homo sapiens
  source 1..23: mol_type = unassigned RNA
ctgccggtggcatttaggggtga

SEQ ID NO: 434 - RNA, 23 nt, Homo sapiens
  source 1..23: mol_type = unassigned RNA
tgccggtggcatttaggggtgac

SEQ ID NO: 435 - RNA, 23 nt, Homo sapiens
  source 1..23: mol_type = unassigned RNA
cggtggcatttaggggtgactcc

SEQ ID NO: 436 - RNA, 23 nt, Homo sapiens
  source 1..23: mol_type = unassigned RNA
tggcatttaggggtgactccttc

SEQ ID NO: 437 - RNA, 23 nt, Homo sapiens
  source 1..23: mol_type = unassigned RNA
ggcatttaggggtgactccttca

SEQ ID NO: 438 - RNA, 23 nt, Homo sapiens
  source 1..23: mol_type = unassigned RNA
gcatttaggggtgactccttcac

SEQ ID NO: 439 - RNA, 23 nt, Homo sapiens
  source 1..23: mol_type = unassigned RNA
catttaggggtgactccttcaca

SEQ ID NO: 440 - RNA, 23 nt, Homo sapiens
  source 1..23: mol_type = unassigned RNA
atttaggggtgactccttcacac

SEQ ID NO: 441 - RNA, 23 nt, Homo sapiens
  source 1..23: mol_type = unassigned RNA
tttaggggtgactccttcacaca

SEQ ID NO: 442 - RNA, 23 nt, Homo sapiens
  source 1..23: mol_type = unassigned RNA
cctctggatccacaggaactgga

SEQ ID NO: 443 - RNA, 23 nt, Homo sapiens
  source 1..23: mol_type = unassigned RNA
tggatccacaggaactggatatt

SEQ ID NO: 444 - RNA, 23 nt, Homo sapiens
  source 1..23: mol_type = unassigned RNA
ggatccacaggaactggatattc

SEQ ID NO: 445 - RNA, 23 nt, Homo sapiens
  source 1..23: mol_type = unassigned RNA
atccacaggaactggatattctg

SEQ ID NO: 446 - RNA, 23 nt, Homo sapiens
  source 1..23: mol_type = unassigned RNA
tccacaggaactggatattctga

SEQ ID NO: 447 - RNA, 23 nt, Homo sapiens
  source 1..23: mol_type = unassigned RNA
gaactggatattctgaaaaccgt

SEQ ID NO: 448 - RNA, 23 nt, Homo sapiens
  source 1..23: mol_type = unassigned RNA
atattctgaaaaccgtaaaggaa

SEQ ID NO: 449 - RNA, 23 nt, Homo sapiens
  source 1..23: mol_type = unassigned RNA
tattctgaaaaccgtaaaggaaa

SEQ ID NO: 450 - RNA, 23 nt, Homo sapiens
  source 1..23: mol_type = unassigned RNA
tctgaaaaccgtaaaggaaatca

SEQ ID NO: 451 - RNA, 23 nt, Homo sapiens
  source 1..23: mol_type = unassigned RNA
ctgaaaaccgtaaaggaaatcac

SEQ ID NO: 452 - DNA, 21 bp, synthetic construct
  misc_feature 1..21: note = Description of Artificial Sequence: Synthetic oligonucleotide
  source 1..21: mol_type = other DNA
  misc_feature 1..19: note = RNA
  misc_feature 20..21: note = DNA
cggccggagtcccgagctatt

SEQ ID NO: 453 - DNA, 21 bp, synthetic construct
  misc_feature 1..21: note = Description of Artificial Sequence: Synthetic oligonucleotide
  source 1..21: mol_type = other DNA
  misc_feature 1..19: note = RNA
  misc_feature 20..21: note = DNA
tagctcgggactccggccgtt

SEQ ID NO: 454 - DNA, 21 bp, synthetic construct
  misc_feature 1..21: note = Description of Artificial Sequence: Synthetic oligonucleotide
  source 1..21: mol_type = other DNA
  misc_feature 1..19: note = RNA
  misc_feature 20..21: note = DNA
ccggagtcccgagctagcctt

SEQ ID NO: 455 - DNA, 21 bp, synthetic construct
  misc_feature 1..21: note = Description of Artificial Sequence: Synthetic oligonucleotide
  source 1..21: mol_type = other DNA
  misc_feature 1..19: note = RNA
  misc_feature 20..21: note = DNA
ggctagctcgggactccggtt

SEQ ID NO: 456 - DNA, 21 bp, synthetic construct
  misc_feature 1..21: note = Description of Artificial Sequence: Synthetic oligonucleotide
  source 1..21: mol_type = other DNA
  misc_feature 1..19: note = RNA
  misc_feature 20..21: note = DNA
cggagtcccgagctagccctt

SEQ ID NO: 457 - DNA, 21 bp, synthetic construct
  misc_feature 1..21: note = Description of Artificial Sequence: Synthetic oligonucleotide
  source 1..21: mol_type = other DNA
  misc_feature 1..19: note = RNA
  misc_feature 20..21: note = DNA
gggctagctcgggactccgtt

SEQ ID NO: 458 - DNA, 21 bp, synthetic construct
  misc_feature 1..21: note = Description of Artificial Sequence: Synthetic oligonucleotide
  source 1..21: mol_type = other DNA
  misc_feature 1..19: note = RNA
  misc_feature 20..21: note = DNA
ggagtcccgagctagcccctt

SEQ ID NO: 459 - DNA, 21 bp, synthetic construct
  misc_feature 1..21: note = Description of Artificial Sequence: Synthetic oligonucleotide
  source 1..21: mol_type = other DNA
  misc_feature 1..19: note = RNA
  misc_feature 20..21: note = DNA
ggggctagctcgggactcctt

SEQ ID NO: 460 - DNA, 21 bp, synthetic construct
  misc_feature 1..21: note = Description of Artificial Sequence: Synthetic oligonucleotide
  source 1..21: mol_type = other DNA
  misc_feature 1..19: note = RNA
  misc_feature 20..21: note = DNA
gagtcccgagctagccccgtt

SEQ ID NO: 461 - DNA, 21 bp, synthetic construct
  misc_feature 1..21: note = Description of Artificial Sequence: Synthetic oligonucleotide
  source 1..21: mol_type = other DNA
  misc_feature 1..19: note = RNA
  misc_feature 20..21: note = DNA
cggggctagctcgggactctt

SEQ ID NO: 462 - DNA, 21 bp, synthetic construct
  misc_feature 1..21: note = Description of Artificial Sequence: Synthetic oligonucleotide
  source 1..21: mol_type = other DNA
  misc_feature 1..19: note = RNA
  misc_feature 20..21: note = DNA
agtcccgagctagccccggtt

SEQ ID NO: 463 - DNA, 21 bp, synthetic construct
  misc_feature 1..21: note = Description of Artificial Sequence: Synthetic oligonucleotide
  source 1..21: mol_type = other DNA
  misc_feature 1..19: note = RNA
  misc_feature 20..21: note = DNA
ccggggctagctcgggacttt

SEQ ID NO: 464 - DNA, 21 bp, synthetic construct
  misc_feature 1..21: note = Description of Artificial Sequence: Synthetic oligonucleotide
  source 1..21: mol_type = other DNA
  misc_feature 1..19: note = RNA
  misc_feature 20..21: note = DNA
gtcccgagctagccccggctt

SEQ ID NO: 465 - DNA, 21 bp, synthetic construct
  misc_feature 1..21: note = Description of Artificial Sequence: Synthetic oligonucleotide
  source 1..21: mol_type = other DNA
  misc_feature 1..19: note = RNA
  misc_feature 20..21: note = DNA
gccggggctagctcgggactt

SEQ ID NO: 466 - DNA, 21 bp, synthetic construct
  misc_feature 1..21: note = Description of Artificial Sequence: Synthetic oligonucleotide
  source 1..21: mol_type = other DNA
  misc_feature 1..19: note = RNA
  misc_feature 20..21: note = DNA
cccgagctagccccggcggtt

SEQ ID NO: 467 - DNA, 21 bp, synthetic construct
  misc_feature 1..21: note = Description of Artificial Sequence: Synthetic oligonucleotide
  source 1..21: mol_type = other DNA
  misc_feature 1..19: note = RNA
  misc_feature 20..21: note = DNA
ccgccggggctagctcgggtt

SEQ ID NO: 468 - DNA, 21 bp, synthetic construct
  misc_feature 1..21: note = Description of Artificial Sequence: Synthetic oligonucleotide
  source 1..21: mol_type = other DNA
  misc_feature 1..19: note = RNA
  misc_feature 20..21: note = DNA
ggacgacaggccacctcgttt

SEQ ID NO: 469 - DNA, 21 bp, synthetic construct
  misc_feature 1..21: note = Description of Artificial Sequence: Synthetic oligonucleotide
  source 1..21: mol_type = other DNA
  misc_feature 1..19: note = RNA
  misc_feature 20..21: note = DNA
acgaggtggcctgtcgtcctt

SEQ ID NO: 470 - DNA, 21 bp, synthetic construct
  misc_feature 1..21: note = Description of Artificial Sequence: Synthetic oligonucleotide
  source 1..21: mol_type = other DNA
  misc_feature 1..19: note = RNA
  misc_feature 20..21: note = DNA
gacgacaggccacctcgtctt

SEQ ID NO: 471 - DNA, 21 bp, synthetic construct
  misc_feature 1..21: note = Description of Artificial Sequence: Synthetic oligonucleotide
  source 1..21: mol_type = other DNA
  misc_feature 1..19: note = RNA
  misc_feature 20..21: note = DNA
gacgaggtggcctgtcgtctt

SEQ ID NO: 472 - DNA, 21 bp, synthetic construct
  misc_feature 1..21: note = Description of Artificial Sequence: Synthetic oligonucleotide
  source 1..21: mol_type = other DNA
  misc_feature 1..19: note = RNA
  misc_feature 20..21: note = DNA
acgacaggccacctcgtcgtt

SEQ ID NO: 473 - DNA, 21 bp, synthetic construct
  misc_feature 1..21: note = Description of Artificial Sequence: Synthetic oligonucleotide
  source 1..21: mol_type = other DNA
  misc_feature 1..19: note = RNA
  misc_feature 20..21: note = DNA
cgacgaggtggcctgtcgttt

SEQ ID NO: 474 - DNA, 21 bp, synthetic construct
  misc_feature 1..21: note = Description of Artificial Sequence: Synthetic oligonucleotide
  source 1..21: mol_type = other DNA
  misc_feature 1..19: note = RNA
  misc_feature 20..21: note = DNA
cgacaggccacctcgtcggtt

SEQ ID NO: 475 - DNA, 21 bp, synthetic construct
  misc_feature 1..21: note = Description of Artificial Sequence: Synthetic oligonucleotide
  source 1..21: mol_type = other DNA
  misc_feature 1..19: note = RNA
  misc_feature 20..21: note = DNA
ccgacgaggtggcctgtcgtt

SEQ ID NO: 476 - DNA, 21 bp, synthetic construct
  misc_feature 1..21: note = Description of Artificial Sequence: Synthetic oligonucleotide
  source 1..21: mol_type = other DNA
  misc_feature 1..19: note = RNA
  misc_feature 20..21: note = DNA
gacaggccacctcgtcggctt

SEQ ID NO: 477 - DNA, 21 bp, synthetic construct
  misc_feature 1..21: note = Description of Artificial Sequence: Synthetic oligonucleotide
  source 1..21: mol_type = other DNA
  misc_feature 1..19: note = RNA
  misc_feature 20..21: note = DNA
gccgacgaggtggcctgtctt

SEQ ID NO: 478 - DNA, 21 bp, synthetic construct
  misc_feature 1..21: note = Description of Artificial Sequence: Synthetic oligonucleotide
  source 1..21: mol_type = other DNA
  misc_feature 1..19: note = RNA
  misc_feature 20..21: note = DNA
caggccacctcgtcggcgttt

SEQ ID NO: 479 - DNA, 21 bp, synthetic construct
  misc_feature 1..21: note = Description of Artificial Sequence: Synthetic oligonucleotide
  source 1..21: mol_type = other DNA
  misc_feature 1..19: note = RNA
  misc_feature 20..21: note = DNA
acgccgacgaggtggcctgtt

SEQ ID NO: 480 - DNA, 21 bp, synthetic construct
  misc_feature 1..21: note = Description of Artificial Sequence: Synthetic oligonucleotide
  source 1..21: mol_type = other DNA
  misc_feature 1..19: note = RNA
  misc_feature 20..21: note = DNA
aggccacctcgtcggcgtctt

SEQ ID NO: 481 - DNA, 21 bp, synthetic construct
  misc_feature 1..21: note = Description of Artificial Sequence: Synthetic oligonucleotide
  source 1..21: mol_type = other DNA
  misc_feature 1..19: note = RNA
  misc_feature 20..21: note = DNA
gacgccgacgaggtggccttt

SEQ ID NO: 482 - DNA, 21 bp, synthetic construct
  misc_feature 1..21: note = Description of Artificial Sequence: Synthetic oligonucleotide
  source 1..21: mol_type = other DNA
  misc_feature 1..19: note = RNA
  misc_feature 20..21: note = DNA
ggccacctcgtcggcgtcctt

SEQ ID NO: 483 - DNA, 21 bp, synthetic construct
  misc_feature 1..21: note = Description of Artificial Sequence: Synthetic oligonucleotide
  source 1..21: mol_type = other DNA
  misc_feature 1..19: note = RNA
  misc_feature 20..21: note = DNA
ggacgccgacgaggtggcctt

SEQ ID NO: 484 - DNA, 21 bp, synthetic construct
  misc_feature 1..21: note = Description of Artificial Sequence: Synthetic oligonucleotide
  source 1..21: mol_type = other DNA
  misc_feature 1..19: note = RNA
  misc_feature 20..21: note = DNA
gccacctcgtcggcgtccgtt

SEQ ID NO: 485 - DNA, 21 bp, synthetic construct
  misc_feature 1..21: note = Description of Artificial Sequence: Synthetic oligonucleotide
  source 1..21: mol_type = other DNA
  misc_feature 1..19: note = RNA
  misc_feature 20..21: note = DNA
cggacgccgacgaggtggctt

SEQ ID NO: 486 - DNA, 21 bp, synthetic construct
  misc_feature 1..21: note = Description of Artificial Sequence: Synthetic oligonucleotide
  source 1..21: mol_type = other DNA
  misc_feature 1..19: note = RNA
  misc_feature 20..21: note = DNA
ccacctcgtcggcgtccgctt

SEQ ID NO: 487 - DNA, 21 bp, synthetic construct
  misc_feature 1..21: note = Description of Artificial Sequence: Synthetic oligonucleotide
  source 1..21: mol_type = other DNA
  misc_feature 1..19: note = RNA
  misc_feature 20..21: note = DNA
gcggacgccgacgaggtggtt

SEQ ID NO: 488 - DNA, 21 bp, synthetic construct
  misc_feature 1..21: note = Description of Artificial Sequence: Synthetic oligonucleotide
  source 1..21: mol_type = other DNA
  misc_feature 1..19: note = RNA
  misc_feature 20..21: note = DNA
cacctcgtcggcgtccgcctt

SEQ ID NO: 489 - DNA, 21 bp, synthetic construct
  misc_feature 1..21: note = Description of Artificial Sequence: Synthetic oligonucleotide
  source 1..21: mol_type = other DNA
  misc_feature 1..19: note = RNA
  misc_feature 20..21: note = DNA
ggcggacgccgacgaggtgtt

SEQ ID NO: 490 - DNA, 21 bp, synthetic construct
  misc_feature 1..21: note = Description of Artificial Sequence: Synthetic oligonucleotide
  source 1..21: mol_type = other DNA
  misc_feature 1..19: note = RNA
  misc_feature 20..21: note = DNA
acctcgtcggcgtccgccctt

SEQ ID NO: 491 - DNA, 21 bp, synthetic construct
  misc_feature 1..21: note = Description of Artificial Sequence: Synthetic oligonucleotide
  source 1..21: mol_type = other DNA
  misc_feature 1..19: note = RNA
  misc_feature 20..21: note = DNA
gggcggacgccgacgaggttt

SEQ ID NO: 492 - DNA, 21 bp, synthetic construct
  misc_feature 1..21: note = Description of Artificial Sequence: Synthetic oligonucleotide
  source 1..21: mol_type = other DNA
  misc_feature 1..19: note = RNA
  misc_feature 20..21: note = DNA
cctcgtcggcgtccgcccgtt

SEQ ID NO: 493 - DNA, 21 bp, synthetic construct
  misc_feature 1..21: note = Description of Artificial Sequence: Synthetic oligonucleotide
  source 1..21: mol_type = other DNA
  misc_feature 1..19: note = RNA
  misc_feature 20..21: note = DNA
cgggcggacgccgacgaggtt

SEQ ID NO: 494 - DNA, 21 bp, synthetic construct
  misc_feature 1..21: note = Description of Artificial Sequence: Synthetic oligonucleotide
  source 1..21: mol_type = other DNA
  misc_feature 1..19: note = RNA
  misc_feature 20..21: note = DNA
ctcgtcggcgtccgcccgatt

SEQ ID NO: 495 - DNA, 21 bp, synthetic construct
  misc_feature 1..21: note = Description of Artificial Sequence: Synthetic oligonucleotide
  source 1..21: mol_type = other DNA
  misc_feature 1..19: note = RNA
  misc_feature 20..21: note = DNA
tcgggcggacgccgacgagtt

SEQ ID NO: 496 - DNA, 21 bp, synthetic construct
  misc_feature 1..21: note = Description of Artificial Sequence: Synthetic oligonucleotide
  source 1..21: mol_type = other DNA
  misc_feature 1..19: note = RNA
  misc_feature 20..21: note = DNA
tcgtcggcgtccgcccgagtt

SEQ ID NO: 497 - DNA, 21 bp, synthetic construct
  misc_feature 1..21: note = Description of Artificial Sequence: Synthetic oligonucleotide
  source 1..21: mol_type = other DNA
  misc_feature 1..19: note = RNA
  misc_feature 20..21: note = DNA
ctcgggcggacgccgacgatt

SEQ ID NO: 498 - DNA, 21 bp, synthetic construct
  misc_feature 1..21: note = Description of Artificial Sequence: Synthetic oligonucleotide
  source 1..21: mol_type = other DNA
  misc_feature 1..19: note = RNA
  misc_feature 20..21: note = DNA
cgtcggcgtccgcccgagttt

SEQ ID NO: 499 - DNA, 21 bp, synthetic construct
  misc_feature 1..21: note = Description of Artificial Sequence: Synthetic oligonucleotide
  source 1..21: mol_type = other DNA
  misc_feature 1..19: note = RNA
  misc_feature 20..21: note = DNA
actcgggcggacgccgacgtt

SEQ ID NO: 500 - DNA, 21 bp, synthetic construct
  misc_feature 1..21: note = Description of Artificial Sequence: Synthetic oligonucleotide
  source 1..21: mol_type = other DNA
  misc_feature 1..19: note = RNA
  misc_feature 20..21: note = DNA
gtcggcgtccgcccgagtctt

SEQ ID NO: 501 - DNA, 21 bp, synthetic construct
  misc_feature 1..21: note = Description of Artificial Sequence: Synthetic oligonucleotide
  source 1..21: mol_type = other DNA
  misc_feature 1..19: note = RNA
  misc_feature 20..21: note = DNA
gactcgggcggacgccgactt

SEQ ID NO: 502 - DNA, 21 bp, synthetic construct
  misc_feature 1..21: note = Description of Artificial Sequence: Synthetic oligonucleotide
  source 1..21: mol_type = other DNA
  misc_feature 1..19: note = RNA
  misc_feature 20..21: note = DNA
tcggcgtccgcccgagtcctt

SEQ ID NO: 503 - DNA, 21 bp, synthetic construct
  misc_feature 1..21: note = Description of Artificial Sequence: Synthetic oligonucleotide
  source 1..21: mol_type = other DNA
  misc_feature 1..19: note = RNA
  misc_feature 20..21: note = DNA
ggactcgggcggacgccgatt

SEQ ID NO: 504 - DNA, 21 bp, synthetic construct
  misc_feature 1..21: note = Description of Artificial Sequence: Synthetic oligonucleotide
  source 1..21: mol_type = other DNA
  misc_feature 1..19: note = RNA
  misc_feature 20..21: note = DNA
gcgtccgcccgagtccccgtt

SEQ ID NO: 505 - DNA, 21 bp, synthetic construct
  misc_feature 1..21: note = Description of Artificial Sequence: Synthetic oligonucleotide
  source 1..21: mol_type = other DNA
  misc_feature 1..19: note = RNA
  misc_feature 20..21: note = DNA
cggggactcgggcggacgctt

SEQ ID NO: 506 - DNA, 21 bp, synthetic construct
  misc_feature 1..21: note = Description of Artificial Sequence: Synthetic oligonucleotide
  source 1..21: mol_type = other DNA
  misc_feature 1..19: note = RNA
  misc_feature 20..21: note = DNA
cgtccgcccgagtccccgctt

SEQ ID NO: 507 - DNA, 21 bp, synthetic construct
  misc_feature 1..21: note = Description of Artificial Sequence: Synthetic oligonucleotide
  source 1..21: mol_type = other DNA
  misc_feature 1..19: note = RNA
  misc_feature 20..21: note = DNA
gcggggactcgggcggacgtt

SEQ ID NO: 508 - DNA, 21 bp, synthetic construct
  misc_feature 1..21: note = Description of Artificial Sequence: Synthetic oligonucleotide
  source 1..21: mol_type = other DNA
  misc_feature 1..19: note = RNA
  misc_feature 20..21: note = DNA
gcccgagtccccgcctcgctt

SEQ ID NO: 509 - DNA, 21 bp, synthetic construct
  misc_feature 1..21: note = Description of Artificial Sequence: Synthetic oligonucleotide
  source 1..21: mol_type = other DNA
  misc_feature 1..19: note = RNA
  misc_feature 20..21: note = DNA
gcgaggcggggactcgggctt

SEQ ID NO: 510 - DNA, 21 bp, synthetic construct
  misc_feature 1..21: note = Description of Artificial Sequence: Synthetic oligonucleotide
  source 1..21: mol_type = other DNA
  misc_feature 1..19: note = RNA
  misc_feature 20..21: note = DNA
aacgccacaaccaccgcgctt

SEQ ID NO: 511 - DNA, 21 bp, synthetic construct
  misc_feature 1..21: note = Description of Artificial Sequence: Synthetic oligonucleotide
  source 1..21: mol_type = other DNA
  misc_feature 1..19: note = RNA
  misc_feature 20..21: note = DNA
gcgcggtggttgtggcgtttt

SEQ ID NO: 512 - DNA, 21 bp, synthetic construct
  misc_feature 1..21: note = Description of Artificial Sequence: Synthetic oligonucleotide
  source 1..21: mol_type = other DNA
  misc_feature 1..19: note = RNA
  misc_feature 20..21: note = DNA
acgccacaaccaccgcgcatt

SEQ ID NO: 513 - DNA, 21 bp, synthetic construct
  misc_feature 1..21: note = Description of Artificial Sequence: Synthetic oligonucleotide
  source 1..21: mol_type = other DNA
  misc_feature 1..19: note = RNA
  misc_feature 20..21: note = DNA
tgcgcggtggttgtggcgttt

SEQ ID NO: 514 - DNA, 21 bp, synthetic construct
  misc_feature 1..21: note = Description of Artificial Sequence: Synthetic oligonucleotide
  source 1..21: mol_type = other DNA
  misc_feature 1..19: note = RNA
  misc_feature 20..21: note = DNA
cgccacaaccaccgcgcactt

SEQ ID NO: 515 - DNA, 21 bp, synthetic construct
  misc_feature 1..21: note = Description of Artificial Sequence: Synthetic oligonucleotide
  source 1..21: mol_type = other DNA
  misc_feature 1..19: note = RNA
  misc_feature 20..21: note = DNA
gtgcgcggtggttgtggcgtt

SEQ ID NO: 516 - DNA, 21 bp, synthetic construct
  misc_feature 1..21: note = Description of Artificial Sequence: Synthetic oligonucleotide
  source 1..21: mol_type = other DNA
  misc_feature 1..19: note = RNA
  misc_feature 20..21: note = DNA
ccacaaccaccgcgcacggtt

SEQ ID NO: 517 - DNA, 21 bp, synthetic construct
  misc_feature 1..21: note = Description of Artificial Sequence: Synthetic oligonucleotide
  source 1..21: mol_type = other DNA
  misc_feature 1..19: note = RNA
  misc_feature 20..21: note = DNA
ccgtgcgcggtggttgtggtt

SEQ ID NO: 518 - DNA, 21 bp, synthetic construct
  misc_feature 1..21: note = Description of Artificial Sequence: Synthetic oligonucleotide
  source 1..21: mol_type = other DNA
  misc_feature 1..19: note = RNA
  misc_feature 20..21: note = DNA
cacaaccaccgcgcacggctt

SEQ ID NO: 519 - DNA, 21 bp, synthetic construct
  misc_feature 1..21: note = Description of Artificial Sequence: Synthetic oligonucleotide
  source 1..21: mol_type = other DNA
  misc_feature 1..19: note = RNA
  misc_feature 20..21: note = DNA
gccgtgcgcggtggttgtgtt

SEQ ID NO: 520 - DNA, 21 bp, synthetic construct
  misc_feature 1..21: note = Description of Artificial Sequence: Synthetic oligonucleotide
  source 1..21: mol_type = other DNA
  misc_feature 1..19: note = RNA
  misc_feature 20..21: note = DNA
acaaccaccgcgcacggcctt

SEQ ID NO: 521 - DNA, 21 bp, synthetic construct
  misc_feature 1..21: note = Description of Artificial Sequence: Synthetic oligonucleotide
  source 1..21: mol_type = other DNA
  misc_feature 1..19: note = RNA
  misc_feature 20..21: note = DNA
ggccgtgcgcggtggttgttt

SEQ ID NO: 522 - DNA, 21 bp, synthetic construct
  misc_feature 1..21: note = Description of Artificial Sequence: Synthetic oligonucleotide
  source 1..21: mol_type = other DNA
  misc_feature 1..19: note = RNA
  misc_feature 20..21: note = DNA
atgcgaccctccgggacggtt

SEQ ID NO: 523 - DNA, 21 bp, synthetic construct
  misc_feature 1..21: note = Description of Artificial Sequence: Synthetic oligonucleotide
  source 1..21: mol_type = other DNA
  misc_feature 1..19: note = RNA
  misc_feature 20..21: note = DNA
ccgtcccggagggtcgcattt

SEQ ID NO: 524 - DNA, 21 bp, synthetic construct
  misc_feature 1..21: note = Description of Artificial Sequence: Synthetic oligonucleotide
  source 1..21: mol_type = other DNA
  misc_feature 1..19: note = RNA
  misc_feature 20..21: note = DNA
tgcgaccctccgggacggctt

SEQ ID NO: 525 - DNA, 21 bp, synthetic construct
  misc_feature 1..21: note = Description of Artificial Sequence: Synthetic oligonucleotide
  source 1..21: mol_type = other DNA
  misc_feature 1..19: note = RNA
  misc_feature 20..21: note = DNA
gccgtcccggagggtcgcatt

SEQ ID NO: 526 - DNA, 21 bp, synthetic construct
  misc_feature 1..21: note = Description of Artificial Sequence: Synthetic oligonucleotide
  source 1..21: mol_type = other DNA
  misc_feature 1..19: note = RNA
  misc_feature 20..21: note = DNA
gcgaccctccgggacggcctt

SEQ ID NO: 527 - DNA, 21 bp, synthetic construct
  misc_feature 1..21: note = Description of Artificial Sequence: Synthetic oligonucleotide
  source 1..21: mol_type = other DNA
  misc_feature 1..19: note = RNA
  misc_feature 20..21: note = DNA
ggccgtcccggagggtcgctt

SEQ ID NO: 528 - DNA, 21 bp, synthetic construct
  misc_feature 1..21: note = Description of Artificial Sequence: Synthetic oligonucleotide
  source 1..21: mol_type = other DNA
  misc_feature 1..19: note = RNA
  misc_feature 20..21: note = DNA
gaccctccgggacggccggtt

SEQ ID NO: 529 - DNA, 21 bp, synthetic construct
  misc_feature 1..21: note = Description of Artificial Sequence: Synthetic oligonucleotide
  source 1..21: mol_type = other DNA
  misc_feature 1..19: note = RNA
  misc_feature 20..21: note = DNA
ccggccgtcccggagggtctt

SEQ ID NO: 530 - DNA, 21 bp, synthetic construct
  misc_feature 1..21: note = Description of Artificial Sequence: Synthetic oligonucleotide
  source 1..21: mol_type = other DNA
  misc_feature 1..19: note = RNA
  misc_feature 20..21: note = DNA
accctccgggacggccgggtt

SEQ ID NO: 531 - DNA, 21 bp, synthetic construct
  misc_feature 1..21: note = Description of Artificial Sequence: Synthetic oligonucleotide
  source 1..21: mol_type = other DNA
  misc_feature 1..19: note = RNA
  misc_feature 20..21: note = DNA
cccggccgtcccggagggttt

SEQ ID NO: 532 - DNA, 21 bp, synthetic construct
  misc_feature 1..21: note = Description of Artificial Sequence: Synthetic oligonucleotide
  source 1..21: mol_type = other DNA
  misc_feature 1..19: note = RNA
  misc_feature 20..21: note = DNA
cctccgggacggccggggctt

SEQ ID NO: 533 - DNA, 21 bp, synthetic construct
  misc_feature 1..21: note = Description of Artificial Sequence: Synthetic oligonucleotide
  source 1..21: mol_type = other DNA
  misc_feature 1..19: note = RNA
  misc_feature 20..21: note = DNA
gccccggccgtcccggaggtt

SEQ ID NO: 534 - DNA, 21 bp, synthetic construct
  misc_feature 1..21: note = Description of Artificial Sequence: Synthetic oligonucleotide
  source 1..21: mol_type = other DNA
  misc_feature 1..19: note = RNA
  misc_feature 20..21: note = DNA
agaaagtttgccaaggcactt

SEQ ID NO: 535 - DNA, 21 bp, synthetic construct
  misc_feature 1..21: note = Description of Artificial Sequence: Synthetic oligonucleotide
  source 1..21: mol_type = other DNA
  misc_feature 1..19: note = RNA
  misc_feature 20..21: note = DNA
gtgccttggcaaactttcttt

SEQ ID NO: 536 - DNA, 21 bp, synthetic construct
  misc_feature 1..21: note = Description of Artificial Sequence: Synthetic oligonucleotide
  source 1..21: mol_type = other DNA
  misc_feature 1..19: note = RNA
  misc_feature 20..21: note = DNA
gaaagtttgccaaggcacgtt

SEQ ID NO: 537 - DNA, 21 bp, synthetic construct
  misc_feature 1..21: note = Description of Artificial Sequence: Synthetic oligonucleotide
  source 1..21: mol_type = other DNA
  misc_feature 1..19: note = RNA
  misc_feature 20..21: note = DNA
cgtgccttggcaaactttctt

SEQ ID NO: 538 - DNA, 21 bp, synthetic construct
  misc_feature 1..21: note = Description of Artificial Sequence: Synthetic oligonucleotide
  source 1..21: mol_type = other DNA
  misc_feature 1..19: note = RNA
  misc_feature 20..21: note = DNA
aagtttgccaaggcacgagtt

SEQ ID NO: 539 - DNA, 21 bp, synthetic construct
  misc_feature 1..21: note = Description of Artificial Sequence: Synthetic oligonucleotide
  source 1..21: mol_type = other DNA
  misc_feature 1..19: note = RNA
  misc_feature 20..21: note = DNA
ctcgtgccttggcaaactttt

SEQ ID NO: 540 - DNA, 21 bp, synthetic construct
  misc_feature 1..21: note = Description of Artificial Sequence: Synthetic oligonucleotide
  source 1..21: mol_type = other DNA
  misc_feature 1..19: note = RNA
  misc_feature 20..21: note = DNA
agtttgccaaggcacgagttt

SEQ ID NO: 541 - DNA, 21 bp, synthetic construct
  misc_feature 1..21: note = Description of Artificial Sequence: Synthetic oligonucleotide
  source 1..21: mol_type = other DNA
  misc_feature 1..19: note = RNA
  misc_feature 20..21: note = DNA
actcgtgccttggcaaacttt

SEQ ID NO: 542 - DNA, 21 bp, synthetic construct
  misc_feature 1..21: note = Description of Artificial Sequence: Synthetic oligonucleotide
  source 1..21: mol_type = other DNA
  misc_feature 1..19: note = RNA
  misc_feature 20..21: note = DNA
gtttgccaaggcacgagtatt

SEQ ID NO: 543 - DNA, 21 bp, synthetic construct
  misc_feature 1..21: note = Description of Artificial Sequence: Synthetic oligonucleotide
  source 1..21: mol_type = other DNA
  misc_feature 1..19: note = RNA
  misc_feature 20..21: note = DNA
tactcgtgccttggcaaactt

SEQ ID NO: 544 - DNA, 21 bp, synthetic construct
  misc_feature 1..21: note = Description of Artificial Sequence: Synthetic oligonucleotide
  source 1..21: mol_type = other DNA
  misc_feature 1..19: note = RNA
  misc_feature 20..21: note = DNA
tttgccaaggcacgagtaatt

SEQ ID NO: 545 - DNA, 21 bp, synthetic construct
  misc_feature 1..21: note = Description of Artificial Sequence: Synthetic oligonucleotide
  source 1..21: mol_type = other DNA
  misc_feature 1..19: note = RNA
  misc_feature 20..21: note = DNA
ttactcgtgccttggcaaatt

SEQ ID NO: 546 - DNA, 21 bp, synthetic construct
  misc_feature 1..21: note = Description of Artificial Sequence: Synthetic oligonucleotide
  source 1..21: mol_type = other DNA
  misc_feature 1..19: note = RNA
  misc_feature 20..21: note = DNA
ttgccaaggcacgagtaactt

SEQ ID NO: 547 - DNA, 21 bp, synthetic construct
  misc_feature 1..21: note = Description of Artificial Sequence: Synthetic oligonucleotide
  source 1..21: mol_type = other DNA
  misc_feature 1..19: note = RNA
  misc_feature 20..21: note = DNA
gttactcgtgccttggcaatt

SEQ ID NO: 548 - DNA, 21 bp, synthetic construct
  misc_feature 1..21: note = Description of Artificial Sequence: Synthetic oligonucleotide
  source 1..21: mol_type = other DNA
  misc_feature 1..19: note = RNA
  misc_feature 20..21: note = DNA
tgccaaggcacgagtaacatt

SEQ ID NO: 549 - DNA, 21 bp, synthetic construct
  misc_feature 1..21: note = Description of Artificial Sequence: Synthetic oligonucleotide
  source 1..21: mol_type = other DNA
  misc_feature 1..19: note = RNA
  misc_feature 20..21: note = DNA
tgttactcgtgccttggcatt

SEQ ID NO: 550 - DNA, 21 bp, synthetic construct
  misc_feature 1..21: note = Description of Artificial Sequence: Synthetic oligonucleotide
  source 1..21: mol_type = other DNA
  misc_feature 1..19: note = RNA
  misc_feature 20..21: note = DNA
gccaaggcacgagtaacaatt

SEQ ID NO: 551 - DNA, 21 bp, synthetic construct
  misc_feature 1..21: note = Description of Artificial Sequence: Synthetic oligonucleotide
  source 1..21: mol_type = other DNA
  misc_feature 1..19: note = RNA
  misc_feature 20..21: note = DNA
ttgttactcgtgccttggctt

SEQ ID NO: 552 - DNA, 21 bp, synthetic construct
  misc_feature 1..21: note = Description of Artificial Sequence: Synthetic oligonucleotide
  source 1..21: mol_type = other DNA
  misc_feature 1..19: note = RNA
  misc_feature 20..21: note = DNA
acgcagttgggcacttttgtt

SEQ ID NO: 553 - DNA, 21 bp, synthetic construct
  misc_feature 1..21: note = Description of Artificial Sequence: Synthetic oligonucleotide
  source 1..21: mol_type = other DNA
  misc_feature 1..19: note = RNA
  misc_feature 20..21: note = DNA
caaaagtgcccaactgcgttt

SEQ ID NO: 554 - DNA, 21 bp, synthetic construct
  misc_feature 1..21: note = Description of Artificial Sequence: Synthetic oligonucleotide
  source 1..21: mol_type = other DNA
  misc_feature 1..19: note = RNA
  misc_feature 20..21: note = DNA
cgcagttgggcacttttgatt

SEQ ID NO: 555 - DNA, 21 bp, synthetic construct
  misc_feature 1..21: note = Description of Artificial Sequence: Synthetic oligonucleotide
  source 1..21: mol_type = other DNA
  misc_feature 1..19: note = RNA
  misc_feature 20..21: note = DNA
tcaaaagtgcccaactgcgtt

SEQ ID NO: 556 - DNA, 21 bp, synthetic construct
  misc_feature 1..21: note = Description of Artificial Sequence: Synthetic oligonucleotide
  source 1..21: mol_type = other DNA
  misc_feature 1..19: note = RNA
  misc_feature 20..21: note = DNA
gcagttgggcacttttgaatt

SEQ ID NO: 557 - DNA, 21 bp, synthetic construct
  misc_feature 1..21: note = Description of Artificial Sequence: Synthetic oligonucleotide
  source 1..21: mol_type = other DNA
  misc_feature 1..19: note = RNA
  misc_feature 20..21: note = DNA
ttcaaaagtgcccaactgctt

SEQ ID NO: 558 - DNA, 21 bp, synthetic construct
  misc_feature 1..21: note = Description of Artificial Sequence: Synthetic oligonucleotide
  source 1..21: mol_type = other DNA
  misc_feature 1..19: note = RNA
  misc_feature 20..21: note = DNA
cagttgggcacttttgaagtt

SEQ ID NO: 559 - DNA, 21 bp, synthetic construct
  misc_feature 1..21: note = Description of Artificial Sequence: Synthetic oligonucleotide
  source 1..21: mol_type = other DNA
  misc_feature 1..19: note = RNA
  misc_feature 20..21: note = DNA
cttcaaaagtgcccaactgtt

SEQ ID NO: 560 - DNA, 21 bp, synthetic construct
  misc_feature 1..21: note = Description of Artificial Sequence: Synthetic oligonucleotide
  source 1..21: mol_type = other DNA
  misc_feature 1..19: note = RNA
  misc_feature 20..21: note = DNA
agttgggcacttttgaagatt

SEQ ID NO: 561 - DNA, 21 bp, synthetic construct
  misc_feature 1..21: note = Description of Artificial Sequence: Synthetic oligonucleotide
  source 1..21: mol_type = other DNA
  misc_feature 1..19: note = RNA
  misc_feature 20..21: note = DNA
tcttcaaaagtgcccaacttt

SEQ ID NO: 562 - DNA, 21 bp, synthetic construct
  misc_feature 1..21: note = Description of Artificial Sequence: Synthetic oligonucleotide
  source 1..21: mol_type = other DNA
  misc_feature 1..19: note = RNA
  misc_feature 20..21: note = DNA
gttgggcacttttgaagattt

SEQ ID NO: 563 - DNA, 21 bp, synthetic construct
  misc_feature 1..21: note = Description of Artificial Sequence: Synthetic oligonucleotide
  source 1..21: mol_type = other DNA
  misc_feature 1..19: note = RNA
  misc_feature 20..21: note = DNA
atcttcaaaagtgcccaactt

SEQ ID NO: 564 - DNA, 21 bp, synthetic construct
  misc_feature 1..21: note = Description of Artificial Sequence: Synthetic oligonucleotide
  source 1..21: mol_type = other DNA
  misc_feature 1..19: note = RNA
  misc_feature 20..21: note = DNA
ttgggcacttttgaagatctt

SEQ ID NO: 565 - DNA, 21 bp, synthetic construct
  misc_feature 1..21: note = Description of Artificial Sequence: Synthetic oligonucleotide
  source 1..21: mol_type = other DNA
  misc_feature 1..19: note = RNA
  misc_feature 20..21: note = DNA
gatcttcaaaagtgcccaatt

SEQ ID NO: 566 - DNA, 21 bp, synthetic construct
  misc_feature 1..21: note = Description of Artificial Sequence: Synthetic oligonucleotide
  source 1..21: mol_type = other DNA
  misc_feature 1..19: note = RNA
  misc_feature 20..21: note = DNA
tgggcacttttgaagatcatt

SEQ ID NO: 567 - DNA, 21 bp, synthetic construct
  misc_feature 1..21: note = Description of Artificial Sequence: Synthetic oligonucleotide
  source 1..21: mol_type = other DNA
  misc_feature 1..19: note = RNA
  misc_feature 20..21: note = DNA
tgatcttcaaaagtgcccatt

SEQ ID NO: 568 - DNA, 21 bp, synthetic construct
  misc_feature 1..21: note = Description of Artificial Sequence: Synthetic oligonucleotide
  source 1..21: mol_type = other DNA
  misc_feature 1..19: note = RNA
  misc_feature 20..21: note = DNA
gggcacttttgaagatcattt

SEQ ID NO: 569 - DNA, 21 bp, synthetic construct
  misc_feature 1..21: note = Description of Artificial Sequence: Synthetic oligonucleotide
  source 1..21: mol_type = other DNA
  misc_feature 1..19: note = RNA
  misc_feature 20..21: note = DNA
atgatcttcaaaagtgccctt

SEQ ID NO: 570 - DNA, 21 bp, synthetic construct
  misc_feature 1..21: note = Description of Artificial Sequence: Synthetic oligonucleotide
  source 1..21: mol_type = other DNA
  misc_feature 1..19: note = RNA
  misc_feature 20..21: note = DNA
ttgaagatcattttctcagtt

SEQ ID NO: 571 - DNA, 21 bp, synthetic construct
  misc_feature 1..21: note = Description of Artificial Sequence: Synthetic oligonucleotide
  source 1..21: mol_type = other DNA
  misc_feature 1..19: note = RNA
  misc_feature 20..21: note = DNA
ctgagaaaatgatcttcaatt

SEQ ID NO: 572 - DNA, 21 bp, synthetic construct
  misc_feature 1..21: note = Description of Artificial Sequence: Synthetic oligonucleotide
  source 1..21: mol_type = other DNA
  misc_feature 1..19: note = RNA
  misc_feature 20..21: note = DNA
gaagatcattttctcagcctt

SEQ ID NO: 573 - DNA, 21 bp, synthetic construct
  misc_feature 1..21: note = Description of Artificial Sequence: Synthetic oligonucleotide
  source 1..21: mol_type = other DNA
  misc_feature 1..19: note = RNA
  misc_feature 20..21: note = DNA
ggctgagaaaatgatcttctt

SEQ ID NO: 574 - DNA, 21 bp, synthetic construct
  misc_feature 1..21: note = Description of Artificial Sequence: Synthetic oligonucleotide
  source 1..21: mol_type = other DNA
  misc_feature 1..19: note = RNA
  misc_feature 20..21: note = DNA
aagatcattttctcagccttt

SEQ ID NO: 575 - DNA, 21 bp, synthetic construct
  misc_feature 1..21: note = Description of Artificial Sequence: Synthetic oligonucleotide
  source 1..21: mol_type = other DNA
  misc_feature 1..19: note = RNA
  misc_feature 20..21: note = DNA
aggctgagaaaatgatctttt

SEQ ID NO: 576 - DNA, 21 bp, synthetic construct
  misc_feature 1..21: note = Description of Artificial Sequence: Synthetic oligonucleotide
  source 1..21: mol_type = other DNA
  misc_feature 1..19: note = RNA
  misc_feature 20..21: note = DNA
cattttctcagcctccagatt

SEQ ID NO: 577 - DNA, 21 bp, synthetic construct
  misc_feature 1..21: note = Description of Artificial Sequence: Synthetic oligonucleotide
  source 1..21: mol_type = other DNA
  misc_feature 1..19: note = RNA
  misc_feature 20..21: note = DNA
tctggaggctgagaaaatgtt

SEQ ID NO: 578 - DNA, 21 bp, synthetic construct
  misc_feature 1..21: note = Description of Artificial Sequence: Synthetic oligonucleotide
  source 1..21: mol_type = other DNA
  misc_feature 1..19: note = RNA
  misc_feature 20..21: note = DNA
agcctccagaggatgttcatt

SEQ ID NO: 579 - DNA, 21 bp, synthetic construct
  misc_feature 1..21: note = Description of Artificial Sequence: Synthetic oligonucleotide
  source 1..21: mol_type = other DNA
  misc_feature 1..19: note = RNA
  misc_feature 20..21: note = DNA
tgaacatcctctggaggcttt

SEQ ID NO: 580 - DNA, 21 bp, synthetic construct
  misc_feature 1..21: note = Description of Artificial Sequence: Synthetic oligonucleotide
  source 1..21: mol_type = other DNA
  misc_feature 1..19: note = RNA
  misc_feature 20..21: note = DNA
cctccagaggatgttcaattt

SEQ ID NO: 581 - DNA, 21 bp, synthetic construct
  misc_feature 1..21: note = Description of Artificial Sequence: Synthetic oligonucleotide
  source 1..21: mol_type = other DNA
  misc_feature 1..19: note = RNA
  misc_feature 20..21: note = DNA
attgaacatcctctggaggtt

SEQ ID NO: 582 - DNA, 21 bp, synthetic construct
  misc_feature 1..21: note = Description of Artificial Sequence: Synthetic oligonucleotide
  source 1..21: mol_type = other DNA
  misc_feature 1..19: note = RNA
  misc_feature 20..21: note = DNA
ctccagaggatgttcaatatt

SEQ ID NO: 583 - DNA, 21 bp, synthetic construct
  misc_feature 1..21: note = Description of Artificial Sequence: Synthetic oligonucleotide
  source 1..21: mol_type = other DNA
  misc_feature 1..19: note = RNA
  misc_feature 20..21: note = DNA
tattgaacatcctctggagtt

SEQ ID NO: 584 - DNA, 21 bp, synthetic construct
  misc_feature 1..21: note = Description of Artificial Sequence: Synthetic oligonucleotide
  source 1..21: mol_type = other DNA
  misc_feature 1..19: note = RNA
  misc_feature 20..21: note = DNA
agaggatgttcaataactgtt

SEQ ID NO: 585 - DNA, 21 bp, synthetic construct
  misc_feature 1..21: note = Description of Artificial Sequence: Synthetic oligonucleotide
  source 1..21: mol_type = other DNA
  misc_feature 1..19: note = RNA
  misc_feature 20..21: note = DNA
cagttattgaacatcctcttt

SEQ ID NO: 586 - DNA, 21 bp, synthetic construct
  misc_feature 1..21: note = Description of Artificial Sequence: Synthetic oligonucleotide
  source 1..21: mol_type = other DNA
  misc_feature 1..19: note = RNA
  misc_feature 20..21: note = DNA
aggatgttcaataactgtgtt

SEQ ID NO: 587 - DNA, 21 bp, synthetic construct
  misc_feature 1..21: note = Description of Artificial Sequence: Synthetic oligonucleotide
  source 1..21: mol_type = other DNA
  misc_feature 1..19: note = RNA
  misc_feature 20..21: note = DNA
cacagttattgaacatccttt

SEQ ID NO: 588 - DNA, 21 bp, synthetic construct
  misc_feature 1..21: note = Description of Artificial Sequence: Synthetic oligonucleotide
  source 1..21: mol_type = other DNA
  misc_feature 1..19: note = RNA
  misc_feature 20..21: note = DNA
tgttcaataactgtgaggttt

SEQ ID NO: 589 - DNA, 21 bp, synthetic construct
  misc_feature 1..21: note = Description of Artificial Sequence: Synthetic oligonucleotide
  source 1..21: mol_type = other DNA
  misc_feature 1..19: note = RNA
  misc_feature 20..21: note = DNA
acctcacagttattgaacatt

SEQ ID NO: 590 - DNA, 21 bp, synthetic construct
  misc_feature 1..21: note = Description of Artificial Sequence: Synthetic oligonucleotide
  source 1..21: mol_type = other DNA
  misc_feature 1..19: note = RNA
  misc_feature 20..21: note = DNA
ttcaataactgtgaggtggtt

SEQ ID NO: 591 - DNA, 21 bp, synthetic construct
  misc_feature 1..21: note = Description of Artificial Sequence: Synthetic oligonucleotide
  source 1..21: mol_type = other DNA
  misc_feature 1..19: note = RNA
  misc_feature 20..21: note = DNA
ccacctcacagttattgaatt

SEQ ID NO: 592 - DNA, 21 bp, synthetic construct
  misc_feature 1..21: note = Description of Artificial Sequence: Synthetic oligonucleotide
  source 1..21: mol_type = other DNA
  misc_feature 1..19: note = RNA
  misc_feature 20..21: note = DNA
tcaataactgtgaggtggttt

SEQ ID NO: 593 - DNA, 21 bp, synthetic construct
  misc_feature 1..21: note = Description of Artificial Sequence: Synthetic oligonucleotide
  source 1..21: mol_type = other DNA
  misc_feature 1..19: note = RNA
  misc_feature 20..21: note = DNA
accacctcacagttattgatt

SEQ ID NO: 594 - DNA, 21 bp, synthetic construct
  misc_feature 1..21: note = Description of Artificial Sequence: Synthetic oligonucleotide
  source 1..21: mol_type = other DNA
  misc_feature 1..19: note = RNA
  misc_feature 20..21: note = DNA
caataactgtgaggtggtctt

SEQ ID NO: 595 - DNA, 21 bp, synthetic construct
  misc_feature 1..21: note = Description of Artificial Sequence: Synthetic oligonucleotide
  source 1..21: mol_type = other DNA
  misc_feature 1..19: note = RNA
  misc_feature 20..21: note = DNA
gaccacctcacagttattgtt

SEQ ID NO: 596 - DNA, 21 bp, synthetic construct
  misc_feature 1..21: note = Description of Artificial Sequence: Synthetic oligonucleotide
  source 1..21: mol_type = other DNA
  misc_feature 1..19: note = RNA
  misc_feature 20..21: note = DNA
aataactgtgaggtggtcctt

SEQ ID NO: 597 - DNA, 21 bp, synthetic construct
  misc_feature 1..21: note = Description of Artificial Sequence: Synthetic oligonucleotide
  source 1..21: mol_type = other DNA
  misc_feature 1..19: note = RNA
  misc_feature 20..21: note = DNA
ggaccacctcacagttatttt

SEQ ID NO: 598 - DNA, 21 bp, synthetic construct
  misc_feature 1..21: note = Description of Artificial Sequence: Synthetic oligonucleotide
  source 1..21: mol_type = other DNA
  misc_feature 1..19: note = RNA
  misc_feature 20..21: note = DNA
ataactgtgaggtggtccttt

SEQ ID NO: 599 - DNA, 21 bp, synthetic construct
  misc_feature 1..21: note = Description of Artificial Sequence: Synthetic oligonucleotide
  source 1..21: mol_type = other DNA
  misc_feature 1..19: note = RNA
  misc_feature 20..21: note = DNA
aggaccacctcacagttattt

SEQ ID NO: 600 - DNA, 21 bp, synthetic construct
  misc_feature 1..21: note = Description of Artificial Sequence: Synthetic oligonucleotide
  source 1..21: mol_type = other DNA
  misc_feature 1..19: note = RNA
  misc_feature 20..21: note = DNA
taactgtgaggtggtcctttt

SEQ ID NO: 601 - DNA, 21 bp, synthetic construct
  misc_feature 1..21: note = Description of Artificial Sequence: Synthetic oligonucleotide
  source 1..21: mol_type = other DNA
  misc_feature 1..19: note = RNA
  misc_feature 20..21: note = DNA
aaggaccacctcacagttatt

SEQ ID NO: 602 - DNA, 21 bp, synthetic construct
  misc_feature 1..21: note = Description of Artificial Sequence: Synthetic oligonucleotide
  source 1..21: mol_type = other DNA
  misc_feature 1..19: note = RNA
  misc_feature 20..21: note = DNA
actgtgaggtggtccttggtt

SEQ ID NO: 603 - DNA, 21 bp, synthetic construct
  misc_feature 1..21: note = Description of Artificial Sequence: Synthetic oligonucleotide
  source 1..21: mol_type = other DNA
  misc_feature 1..19: note = RNA
  misc_feature 20..21: note = DNA
ccaaggaccacctcacagttt

SEQ ID NO: 604 - DNA, 21 bp, synthetic construct
  misc_feature 1..21: note = Description of Artificial Sequence: Synthetic oligonucleotide
  source 1..21: mol_type = other DNA
  misc_feature 1..19: note = RNA
  misc_feature 20..21: note = DNA
tgtgaggtggtccttgggatt

SEQ ID NO: 605 - DNA, 21 bp, synthetic construct
  misc_feature 1..21: note = Description of Artificial Sequence: Synthetic oligonucleotide
  source 1..21: mol_type = other DNA
  misc_feature 1..19: note = RNA
  misc_feature 20..21: note = DNA
tcccaaggaccacctcacatt

SEQ ID NO: 606 - DNA, 21 bp, synthetic construct
  misc_feature 1..21: note = Description of Artificial Sequence: Synthetic oligonucleotide
  source 1..21: mol_type = other DNA
  misc_feature 1..19: note = RNA
  misc_feature 20..21: note = DNA
gtgaggtggtccttgggaatt

SEQ ID NO: 607 - DNA, 21 bp, synthetic construct
  misc_feature 1..21: note = Description of Artificial Sequence: Synthetic oligonucleotide
  source 1..21: mol_type = other DNA
  misc_feature 1..19: note = RNA
  misc_feature 20..21: note = DNA
ttcccaaggaccacctcactt

SEQ ID NO: 608 - DNA, 21 bp, synthetic construct
  misc_feature 1..21: note = Description of Artificial Sequence: Synthetic oligonucleotide
  source 1..21: mol_type = other DNA
  misc_feature 1..19: note = RNA
  misc_feature 20..21: note = DNA
tggtccttgggaatttggatt

SEQ ID NO: 609 - DNA, 21 bp, synthetic construct
  misc_feature 1..21: note = Description of Artificial Sequence: Synthetic oligonucleotide
  source 1..21: mol_type = other DNA
  misc_feature 1..19: note = RNA
  misc_feature 20..21: note = DNA
tccaaattcccaaggaccatt

SEQ ID NO: 610 - DNA, 21 bp, synthetic construct
  misc_feature 1..21: note = Description of Artificial Sequence: Synthetic oligonucleotide
  source 1..21: mol_type = other DNA
  misc_feature 1..19: note = RNA
  misc_feature 20..21: note = DNA
ttgggaatttggaaattactt

SEQ ID NO: 611 - DNA, 21 bp, synthetic construct
  misc_feature 1..21: note = Description of Artificial Sequence: Synthetic oligonucleotide
  source 1..21: mol_type = other DNA
  misc_feature 1..19: note = RNA
  misc_feature 20..21: note = DNA
gtaatttccaaattcccaatt

SEQ ID NO: 612 - DNA, 21 bp, synthetic construct
  misc_feature 1..21: note = Description of Artificial Sequence: Synthetic oligonucleotide
  source 1..21: mol_type = other DNA
  misc_feature 1..19: note = RNA
  misc_feature 20..21: note = DNA
tgggaatttggaaattacctt

SEQ ID NO: 613 - DNA, 21 bp, synthetic construct
  misc_feature 1..21: note = Description of Artificial Sequence: Synthetic oligonucleotide
  source 1..21: mol_type = other DNA
  misc_feature 1..19: note = RNA
  misc_feature 20..21: note = DNA
ggtaatttccaaattcccatt

SEQ ID NO: 614 - DNA, 21 bp, synthetic construct
  misc_feature 1..21: note = Description of Artificial Sequence: Synthetic oligonucleotide
  source 1..21: mol_type = other DNA
  misc_feature 1..19: note = RNA
  misc_feature 20..21: note = DNA
gggaatttggaaattaccttt

SEQ ID NO: 615 - DNA, 21 bp, synthetic construct
  misc_feature 1..21: note = Description of Artificial Sequence: Synthetic oligonucleotide
  source 1..21: mol_type = other DNA
  misc_feature 1..19: note = RNA
  misc_feature 20..21: note = DNA
aggtaatttccaaattccctt

SEQ ID NO: 616 - DNA, 21 bp, synthetic construct
  misc_feature 1..21: note = Description of Artificial Sequence: Synthetic oligonucleotide
  source 1..21: mol_type = other DNA
  misc_feature 1..19: note = RNA
  misc_feature 20..21: note = DNA
ggaatttggaaattacctatt

SEQ ID NO: 617 - DNA, 21 bp, synthetic construct
  misc_feature 1..21: note = Description of Artificial Sequence: Synthetic oligonucleotide
  source 1..21: mol_type = other DNA
  misc_feature 1..19: note = RNA
  misc_feature 20..21: note = DNA
taggtaatttccaaattcctt

SEQ ID NO: 618 - DNA, 21 bp, synthetic construct
  misc_feature 1..21: note = Description of Artificial Sequence: Synthetic oligonucleotide
  source 1..21: mol_type = other DNA
  misc_feature 1..19: note = RNA
  misc_feature 20..21: note = DNA
agaggaattatgatctttctt

SEQ ID NO: 619 - DNA, 21 bp, synthetic construct
  misc_feature 1..21: note = Description of Artificial Sequence: Synthetic oligonucleotide
  source 1..21: mol_type = other DNA
  misc_feature 1..19: note = RNA
  misc_feature 20..21: note = DNA
gaaagatcataattcctcttt

SEQ ID NO: 620 - DNA, 21 bp, synthetic construct
  misc_feature 1..21: note = Description of Artificial Sequence: Synthetic oligonucleotide
  source 1..21: mol_type = other DNA
  misc_feature 1..19: note = RNA
  misc_feature 20..21: note = DNA
gaggaattatgatctttcctt

SEQ ID NO: 621 - DNA, 21 bp, synthetic construct
  misc_feature 1..21: note = Description of Artificial Sequence: Synthetic oligonucleotide
  source 1..21: mol_type = other DNA
  misc_feature 1..19: note = RNA
  misc_feature 20..21: note = DNA
ggaaagatcataattcctctt

SEQ ID NO: 622 - DNA, 21 bp, synthetic construct
  misc_feature 1..21: note = Description of Artificial Sequence: Synthetic oligonucleotide
  source 1..21: mol_type = other DNA
  misc_feature 1..19: note = RNA
  misc_feature 20..21: note = DNA
aattatgatctttccttcttt

SEQ ID NO: 623 - DNA, 21 bp, synthetic construct
  misc_feature 1..21: note = Description of Artificial Sequence: Synthetic oligonucleotide
  source 1..21: mol_type = other DNA
  misc_feature 1..19: note = RNA
  misc_feature 20..21: note = DNA
agaaggaaagatcataatttt

SEQ ID NO: 624 - DNA, 21 bp, synthetic construct
  misc_feature 1..21: note = Description of Artificial Sequence: Synthetic oligonucleotide
  source 1..21: mol_type = other DNA
  misc_feature 1..19: note = RNA
  misc_feature 20..21: note = DNA
attatgatctttccttctttt

SEQ ID NO: 625 - DNA, 21 bp, synthetic construct
  misc_feature 1..21: note = Description of Artificial Sequence: Synthetic oligonucleotide
  source 1..21: mol_type = other DNA
  misc_feature 1..19: note = RNA
  misc_feature 20..21: note = DNA
aagaaggaaagatcataattt

SEQ ID NO: 626 - DNA, 21 bp, synthetic construct
  misc_feature 1..21: note = Description of Artificial Sequence: Synthetic oligonucleotide
  source 1..21: mol_type = other DNA
  misc_feature 1..19: note = RNA
  misc_feature 20..21: note = DNA
tatgatctttccttcttaatt

SEQ ID NO: 627 - DNA, 21 bp, synthetic construct
  misc_feature 1..21: note = Description of Artificial Sequence: Synthetic oligonucleotide
  source 1..21: mol_type = other DNA
  misc_feature 1..19: note = RNA
  misc_feature 20..21: note = DNA
ttaagaaggaaagatcatatt

SEQ ID NO: 628 - DNA, 21 bp, synthetic construct
  misc_feature 1..21: note = Description of Artificial Sequence: Synthetic oligonucleotide
  source 1..21: mol_type = other DNA
  misc_feature 1..19: note = RNA
  misc_feature 20..21: note = DNA
tgatctttccttcttaaagtt

SEQ ID NO: 629 - DNA, 21 bp, synthetic construct
  misc_feature 1..21: note = Description of Artificial Sequence: Synthetic oligonucleotide
  source 1..21: mol_type = other DNA
  misc_feature 1..19: note = RNA
  misc_feature 20..21: note = DNA
ctttaagaaggaaagatcatt

SEQ ID NO: 630 - DNA, 21 bp, synthetic construct
  misc_feature 1..21: note = Description of Artificial Sequence: Synthetic oligonucleotide
  source 1..21: mol_type = other DNA
  misc_feature 1..19: note = RNA
  misc_feature 20..21: note = DNA
tctttccttcttaaagacctt

SEQ ID NO: 631 - DNA, 21 bp, synthetic construct
  misc_feature 1..21: note = Description of Artificial Sequence: Synthetic oligonucleotide
  source 1..21: mol_type = other DNA
  misc_feature 1..19: note = RNA
  misc_feature 20..21: note = DNA
ggtctttaagaaggaaagatt

SEQ ID NO: 632 - DNA, 21 bp, synthetic construct
  misc_feature 1..21: note = Description of Artificial Sequence: Synthetic oligonucleotide
  source 1..21: mol_type = other DNA
  misc_feature 1..19: note = RNA
  misc_feature 20..21: note = DNA
ccttcttaaagaccatccatt

SEQ ID NO: 633 - DNA, 21 bp, synthetic construct
  misc_feature 1..21: note = Description of Artificial Sequence: Synthetic oligonucleotide
  source 1..21: mol_type = other DNA
  misc_feature 1..19: note = RNA
  misc_feature 20..21: note = DNA
tggatggtctttaagaaggtt

SEQ ID NO: 634 - DNA, 21 bp, synthetic construct
  misc_feature 1..21: note = Description of Artificial Sequence: Synthetic oligonucleotide
  source 1..21: mol_type = other DNA
  misc_feature 1..19: note = RNA
  misc_feature 20..21: note = DNA
cttcttaaagaccatccagtt

SEQ ID NO: 635 - DNA, 21 bp, synthetic construct
  misc_feature 1..21: note = Description of Artificial Sequence: Synthetic oligonucleotide
  source 1..21: mol_type = other DNA
  misc_feature 1..19: note = RNA
  misc_feature 20..21: note = DNA
ctggatggtctttaagaagtt

SEQ ID NO: 636 - DNA, 21 bp, synthetic construct
  misc_feature 1..21: note = Description of Artificial Sequence: Synthetic oligonucleotide
  source 1..21: mol_type = other DNA
  misc_feature 1..19: note = RNA
  misc_feature 20..21: note = DNA
tcttaaagaccatccaggatt

SEQ ID NO: 637 - DNA, 21 bp, synthetic construct
  misc_feature 1..21: note = Description of Artificial Sequence: Synthetic oligonucleotide
  source 1..21: mol_type = other DNA
  misc_feature 1..19: note = RNA
  misc_feature 20..21: note = DNA
tcctggatggtctttaagatt

SEQ ID NO: 638 - DNA, 21 bp, synthetic construct
  misc_feature 1..21: note = Description of Artificial Sequence: Synthetic oligonucleotide
  source 1..21: mol_type = other DNA
  misc_feature 1..19: note = RNA
  misc_feature 20..21: note = DNA
ttaaagaccatccaggaggtt

SEQ ID NO: 639 - DNA, 21 bp, synthetic construct
  misc_feature 1..21: note = Description of Artificial Sequence: Synthetic oligonucleotide
  source 1..21: mol_type = other DNA
  misc_feature 1..19: note = RNA
  misc_feature 20..21: note = DNA
cctcctggatggtctttaatt

SEQ ID NO: 640 - DNA, 21 bp, synthetic construct
  misc_feature 1..21: note = Description of Artificial Sequence: Synthetic oligonucleotide
  source 1..21: mol_type = other DNA
  misc_feature 1..19: note = RNA
  misc_feature 20..21: note = DNA
taaagaccatccaggaggttt

SEQ ID NO: 641 - DNA, 21 bp, synthetic construct
  misc_feature 1..21: note = Description of Artificial Sequence: Synthetic oligonucleotide
  source 1..21: mol_type = other DNA
  misc_feature 1..19: note = RNA
  misc_feature 20..21: note = DNA
acctcctggatggtctttatt

SEQ ID NO: 642 - DNA, 21 bp, synthetic construct
  misc_feature 1..21: note = Description of Artificial Sequence: Synthetic oligonucleotide
  source 1..21: mol_type = other DNA
  misc_feature 1..19: note = RNA
  misc_feature 20..21: note = DNA
ccaggaggtggctggttattt

SEQ ID NO: 643 - DNA, 21 bp, synthetic construct
  misc_feature 1..21: note = Description of Artificial Sequence: Synthetic oligonucleotide
  source 1..21: mol_type = other DNA
  misc_feature 1..19: note = RNA
  misc_feature 20..21: note = DNA
ataaccagccacctcctggtt

SEQ ID NO: 644 - DNA, 21 bp, synthetic construct
  misc_feature 1..21: note = Description of Artificial Sequence: Synthetic oligonucleotide
  source 1..21: mol_type = other DNA
  misc_feature 1..19: note = RNA
  misc_feature 20..21: note = DNA
caggaggtggctggttatgtt

SEQ ID NO: 645 - DNA, 21 bp, synthetic construct
  misc_feature 1..21: note = Description of Artificial Sequence: Synthetic oligonucleotide
  source 1..21: mol_type = other DNA
  misc_feature 1..19: note = RNA
  misc_feature 20..21: note = DNA
cataaccagccacctcctgtt

SEQ ID NO: 646 - DNA, 21 bp, synthetic construct
  misc_feature 1..21: note = Description of Artificial Sequence: Synthetic oligonucleotide
  source 1..21: mol_type = other DNA
  misc_feature 1..19: note = RNA
  misc_feature 20..21: note = DNA
aggaggtggctggttatgttt

SEQ ID NO: 647 - DNA, 21 bp, synthetic construct
  misc_feature 1..21: note = Description of Artificial Sequence: Synthetic oligonucleotide
  source 1..21: mol_type = other DNA
  misc_feature 1..19: note = RNA
  misc_feature 20..21: note = DNA
acataaccagccacctccttt

SEQ ID NO: 648 - DNA, 21 bp, synthetic construct
  misc_feature 1..21: note = Description of Artificial Sequence: Synthetic oligonucleotide
  source 1..21: mol_type = other DNA
  misc_feature 1..19: note = RNA
  misc_feature 20..21: note = DNA
ggaggtggctggttatgtctt

SEQ ID NO: 649 - DNA, 21 bp, synthetic construct
  misc_feature 1..21: note = Description of Artificial Sequence: Synthetic oligonucleotide
  source 1..21: mol_type = other DNA
  misc_feature 1..19: note = RNA
  misc_feature 20..21: note = DNA
gacataaccagccacctcctt

SEQ ID NO: 650 - DNA, 21 bp, synthetic construct
  misc_feature 1..21: note = Description of Artificial Sequence: Synthetic oligonucleotide
  source 1..21: mol_type = other DNA
  misc_feature 1..19: note = RNA
  misc_feature 20..21: note = DNA
gaggtggctggttatgtcctt

SEQ ID NO: 651 - DNA, 21 bp, synthetic construct
  misc_feature 1..21: note = Description of Artificial Sequence: Synthetic oligonucleotide
  source 1..21: mol_type = other DNA
  misc_feature 1..19: note = RNA
  misc_feature 20..21: note = DNA
ggacataaccagccacctctt

SEQ ID NO: 652 - DNA, 21 bp, synthetic construct
  misc_feature 1..21: note = Description of Artificial Sequence: Synthetic oligonucleotide
  source 1..21: mol_type = other DNA
  misc_feature 1..19: note = RNA
  misc_feature 20..21: note = DNA
aggtggctggttatgtccttt

SEQ ID NO: 653 - DNA, 21 bp, synthetic construct
  misc_feature 1..21: note = Description of Artificial Sequence: Synthetic oligonucleotide
  source 1..21: mol_type = other DNA
  misc_feature 1..19: note = RNA
  misc_feature 20..21: note = DNA
aggacataaccagccaccttt

SEQ ID NO: 654 - DNA, 21 bp, synthetic construct
  misc_feature 1..21: note = Description of Artificial Sequence: Synthetic oligonucleotide
  source 1..21: mol_type = other DNA
  misc_feature 1..19: note = RNA
  misc_feature 20..21: note = DNA
gtggctggttatgtcctcatt

SEQ ID NO: 655 - DNA, 21 bp, synthetic construct
  misc_feature 1..21: note = Description of Artificial Sequence: Synthetic oligonucleotide
  source 1..21: mol_type = other DNA
  misc_feature 1..19: note = RNA
  misc_feature 20..21: note = DNA
tgaggacataaccagccactt

SEQ ID NO: 656 - DNA, 21 bp, synthetic construct
  misc_feature 1..21: note = Description of Artificial Sequence: Synthetic oligonucleotide
  source 1..21: mol_type = other DNA
  misc_feature 1..19: note = RNA
  misc_feature 20..21: note = DNA
gccctcaacacagtggagctt

SEQ ID NO: 657 - DNA, 21 bp, synthetic construct
  misc_feature 1..21: note = Description of Artificial Sequence: Synthetic oligonucleotide
  source 1..21: mol_type = other DNA
  misc_feature 1..19: note = RNA
  misc_feature 20..21: note = DNA
gctccactgtgttgagggctt

SEQ ID NO: 658 - DNA, 21 bp, synthetic construct
  misc_feature 1..21: note = Description of Artificial Sequence: Synthetic oligonucleotide
  source 1..21: mol_type = other DNA
  misc_feature 1..19: note = RNA
  misc_feature 20..21: note = DNA
ttcctttggaaaacctgcatt

SEQ ID NO: 659 - DNA, 21 bp, synthetic construct
  misc_feature 1..21: note = Description of Artificial Sequence: Synthetic oligonucleotide
  source 1..21: mol_type = other DNA
  misc_feature 1..19: note = RNA
  misc_feature 20..21: note = DNA
tgcaggttttccaaaggaatt

SEQ ID NO: 660 - DNA, 21 bp, synthetic construct
  misc_feature 1..21: note = Description of Artificial Sequence: Synthetic oligonucleotide
  source 1..21: mol_type = other DNA
  misc_feature 1..19: note = RNA
  misc_feature 20..21: note = DNA
tcctttggaaaacctgcagtt

SEQ ID NO: 661 - DNA, 21 bp, synthetic construct
  misc_feature 1..21: note = Description of Artificial Sequence: Synthetic oligonucleotide
  source 1..21: mol_type = other DNA
  misc_feature 1..19: note = RNA
  misc_feature 20..21: note = DNA
ctgcaggttttccaaaggatt

SEQ ID NO: 662 - DNA, 21 bp, synthetic construct
  misc_feature 1..21: note = Description of Artificial Sequence: Synthetic oligonucleotide
  source 1..21: mol_type = other DNA
  misc_feature 1..19: note = RNA
  misc_feature 20..21: note = DNA
gaaaacctgcagatcatcatt

SEQ ID NO: 663 - DNA, 21 bp, synthetic construct
  misc_feature 1..21: note = Description of Artificial Sequence: Synthetic oligonucleotide
  source 1..21: mol_type = other DNA
  misc_feature 1..19: note = RNA
  misc_feature 20..21: note = DNA
tgatgatctgcaggttttctt

SEQ ID NO: 664 - DNA, 21 bp, synthetic construct
  misc_feature 1..21: note = Description of Artificial Sequence: Synthetic oligonucleotide
  source 1..21: mol_type = other DNA
  misc_feature 1..19: note = RNA
  misc_feature 20..21: note = DNA
aaaacctgcagatcatcagtt

SEQ ID NO: 665 - DNA, 21 bp, synthetic construct
  misc_feature 1..21: note = Description of Artificial Sequence: Synthetic oligonucleotide
  source 1..21: mol_type = other DNA
  misc_feature 1..19: note = RNA
  misc_feature 20..21: note = DNA
ctgatgatctgcaggtttttt

SEQ ID NO: 666 - DNA, 21 bp, synthetic construct
  misc_feature 1..21: note = Description of Artificial Sequence: Synthetic oligonucleotide
  source 1..21: mol_type = other DNA
  misc_feature 1..19: note = RNA
  misc_feature 20..21: note = DNA
aacctgcagatcatcagagtt

SEQ ID NO: 667 - DNA, 21 bp, synthetic construct
  misc_feature 1..21: note = Description of Artificial Sequence: Synthetic oligonucleotide
  source 1..21: mol_type = other DNA
  misc_feature 1..19: note = RNA
  misc_feature 20..21: note = DNA
ctctgatgatctgcaggtttt

SEQ ID NO: 668 - DNA, 21 bp, synthetic construct
  misc_feature 1..21: note = Description of Artificial Sequence: Synthetic oligonucleotide
  source 1..21: mol_type = other DNA
  misc_feature 1..19: note = RNA
  misc_feature 20..21: note = DNA
ctgcagatcatcagaggaatt

SEQ ID NO: 669 - DNA, 21 bp, synthetic construct
  misc_feature 1..21: note = Description of Artificial Sequence: Synthetic oligonucleotide
  source 1..21: mol_type = other DNA
  misc_feature 1..19: note = RNA
  misc_feature 20..21: note = DNA
ttcctctgatgatctgcagtt

SEQ ID NO: 670 - DNA, 21 bp, synthetic construct
  misc_feature 1..21: note = Description of Artificial Sequence: Synthetic oligonucleotide
  source 1..21: mol_type = other DNA
  misc_feature 1..19: note = RNA
  misc_feature 20..21: note = DNA
gaaaattcctatgccttagtt

SEQ ID NO: 671 - DNA, 21 bp, synthetic construct
  misc_feature 1..21: note = Description of Artificial Sequence: Synthetic oligonucleotide
  source 1..21: mol_type = other DNA
  misc_feature 1..19: note = RNA
  misc_feature 20..21: note = DNA
ctaaggcataggaattttctt

SEQ ID NO: 672 - DNA, 21 bp, synthetic construct
  misc_feature 1..21: note = Description of Artificial Sequence: Synthetic oligonucleotide
  source 1..21: mol_type = other DNA
  misc_feature 1..19: note = RNA
  misc_feature 20..21: note = DNA
aaaattcctatgccttagctt

SEQ ID NO: 673 - DNA, 21 bp, synthetic construct
  misc_feature 1..21: note = Description of Artificial Sequence: Synthetic oligonucleotide
  source 1..21: mol_type = other DNA
  misc_feature 1..19: note = RNA
  misc_feature 20..21: note = DNA
gctaaggcataggaatttttt

SEQ ID NO: 674 - DNA, 21 bp, synthetic construct
  misc_feature 1..21: note = Description of Artificial Sequence: Synthetic oligonucleotide
  source 1..21: mol_type = other DNA
  misc_feature 1..19: note = RNA
  misc_feature 20..21: note = DNA
aattcctatgccttagcagtt

SEQ ID NO: 675 - DNA, 21 bp, synthetic construct
  misc_feature 1..21: note = Description of Artificial Sequence: Synthetic oligonucleotide
  source 1..21: mol_type = other DNA
  misc_feature 1..19: note = RNA
  misc_feature 20..21: note = DNA
ctgctaaggcataggaatttt

SEQ ID NO: 676 - DNA, 21 bp, synthetic construct
  misc_feature 1..21: note = Description of Artificial Sequence: Synthetic oligonucleotide
  source 1..21: mol_type = other DNA
  misc_feature 1..19: note = RNA
  misc_feature 20..21: note = DNA
tcctatgccttagcagtcttt

SEQ ID NO: 677 - DNA, 21 bp, synthetic construct
  misc_feature 1..21: note = Description of Artificial Sequence: Synthetic oligonucleotide
  source 1..21: mol_type = other DNA
  misc_feature 1..19: note = RNA
  misc_feature 20..21: note = DNA
agactgctaaggcataggatt

SEQ ID NO: 678 - DNA, 21 bp, synthetic construct
  misc_feature 1..21: note = Description of Artificial Sequence: Synthetic oligonucleotide
  source 1..21: mol_type = other DNA
  misc_feature 1..19: note = RNA
  misc_feature 20..21: note = DNA
cctatgccttagcagtctttt

SEQ ID NO: 679 - DNA, 21 bp, synthetic construct
  misc_feature 1..21: note = Description of Artificial Sequence: Synthetic oligonucleotide
  source 1..21: mol_type = other DNA
  misc_feature 1..19: note = RNA
  misc_feature 20..21: note = DNA
aagactgctaaggcataggtt

SEQ ID NO: 680 - DNA, 21 bp, synthetic construct
  misc_feature 1..21: note = Description of Artificial Sequence: Synthetic oligonucleotide
  source 1..21: mol_type = other DNA
  misc_feature 1..19: note = RNA
  misc_feature 20..21: note = DNA
ctatgccttagcagtcttatt

SEQ ID NO: 681 - DNA, 21 bp, synthetic construct
  misc_feature 1..21: note = Description of Artificial Sequence: Synthetic oligonucleotide
  source 1..21: mol_type = other DNA
  misc_feature 1..19: note = RNA
  misc_feature 20..21: note = DNA
taagactgctaaggcatagtt

SEQ ID NO: 682 - DNA, 21 bp, synthetic construct
  misc_feature 1..21: note = Description of Artificial Sequence: Synthetic oligonucleotide
  source 1..21: mol_type = other DNA
  misc_feature 1..19: note = RNA
  misc_feature 20..21: note = DNA
atgccttagcagtcttatctt

SEQ ID NO: 683 - DNA, 21 bp, synthetic construct
  misc_feature 1..21: note = Description of Artificial Sequence: Synthetic oligonucleotide
  source 1..21: mol_type = other DNA
  misc_feature 1..19: note = RNA
  misc_feature 20..21: note = DNA
gataagactgctaaggcattt

SEQ ID NO: 684 - DNA, 21 bp, synthetic construct
  misc_feature 1..21: note = Description of Artificial Sequence: Synthetic oligonucleotide
  source 1..21: mol_type = other DNA
  misc_feature 1..19: note = RNA
  misc_feature 20..21: note = DNA
tgccttagcagtcttatcttt

SEQ ID NO: 685 - DNA, 21 bp, synthetic construct
  misc_feature 1..21: note = Description of Artificial Sequence: Synthetic oligonucleotide
  source 1..21: mol_type = other DNA
  misc_feature 1..19: note = RNA
  misc_feature 20..21: note = DNA
agataagactgctaaggcatt

SEQ ID NO: 686 - DNA, 21 bp, synthetic construct
  misc_feature 1..21: note = Description of Artificial Sequence: Synthetic oligonucleotide
  source 1..21: mol_type = other DNA
  misc_feature 1..19: note = RNA
  misc_feature 20..21: note = DNA
gccttagcagtcttatctatt

SEQ ID NO: 687 - DNA, 21 bp, synthetic construct
  misc_feature 1..21: note = Description of Artificial Sequence: Synthetic oligonucleotide
  source 1..21: mol_type = other DNA
  misc_feature 1..19: note = RNA
  misc_feature 20..21: note = DNA
tagataagactgctaaggctt

SEQ ID NO: 688 - DNA, 21 bp, synthetic construct
  misc_feature 1..21: note = Description of Artificial Sequence: Synthetic oligonucleotide
  source 1..21: mol_type = other DNA
  misc_feature 1..19: note = RNA
  misc_feature 20..21: note = DNA
ccttagcagtcttatctaatt

SEQ ID NO: 689 - DNA, 21 bp, synthetic construct
  misc_feature 1..21: note = Description of Artificial Sequence: Synthetic oligonucleotide
  source 1..21: mol_type = other DNA
  misc_feature 1..19: note = RNA
  misc_feature 20..21: note = DNA
ttagataagactgctaaggtt

SEQ ID NO: 690 - DNA, 21 bp, synthetic construct
  misc_feature 1..21: note = Description of Artificial Sequence: Synthetic oligonucleotide
  source 1..21: mol_type = other DNA
  misc_feature 1..19: note = RNA
  misc_feature 20..21: note = DNA
cttagcagtcttatctaactt

SEQ ID NO: 691 - DNA, 21 bp, synthetic construct
  misc_feature 1..21: note = Description of Artificial Sequence: Synthetic oligonucleotide
  source 1..21: mol_type = other DNA
  misc_feature 1..19: note = RNA
  misc_feature 20..21: note = DNA
gttagataagactgctaagtt

SEQ ID NO: 692 - DNA, 21 bp, synthetic construct
  misc_feature 1..21: note = Description of Artificial Sequence: Synthetic oligonucleotide
  source 1..21: mol_type = other DNA
  misc_feature 1..19: note = RNA
  misc_feature 20..21: note = DNA
ttagcagtcttatctaacttt

SEQ ID NO: 693 - DNA, 21 bp, synthetic construct
  misc_feature 1..21: note = Description of Artificial Sequence: Synthetic oligonucleotide
  source 1..21: mol_type = other DNA
  misc_feature 1..19: note = RNA
  misc_feature 20..21: note = DNA
agttagataagactgctaatt

SEQ ID NO: 694 - DNA, 21 bp, synthetic construct
  misc_feature 1..21: note = Description of Artificial Sequence: Synthetic oligonucleotide
  source 1..21: mol_type = other DNA
  misc_feature 1..19: note = RNA
  misc_feature 20..21: note = DNA
tagcagtcttatctaactatt

SEQ ID NO: 695 - DNA, 21 bp, synthetic construct
  misc_feature 1..21: note = Description of Artificial Sequence: Synthetic oligonucleotide
  source 1..21: mol_type = other DNA
  misc_feature 1..19: note = RNA
  misc_feature 20..21: note = DNA
tagttagataagactgctatt

SEQ ID NO: 696 - DNA, 21 bp, synthetic construct
  misc_feature 1..21: note = Description of Artificial Sequence: Synthetic oligonucleotide
  source 1..21: mol_type = other DNA
  misc_feature 1..19: note = RNA
  misc_feature 20..21: note = DNA
agcagtcttatctaactattt

SEQ ID NO: 697 - DNA, 21 bp, synthetic construct
  misc_feature 1..21: note = Description of Artificial Sequence: Synthetic oligonucleotide
  source 1..21: mol_type = other DNA
  misc_feature 1..19: note = RNA
  misc_feature 20..21: note = DNA
atagttagataagactgcttt

SEQ ID NO: 698 - DNA, 21 bp, synthetic construct
  misc_feature 1..21: note = Description of Artificial Sequence: Synthetic oligonucleotide
  source 1..21: mol_type = other DNA
  misc_feature 1..19: note = RNA
  misc_feature 20..21: note = DNA
gcagtcttatctaactatgtt

SEQ ID NO: 699 - DNA, 21 bp, synthetic construct
  misc_feature 1..21: note = Description of Artificial Sequence: Synthetic oligonucleotide
  source 1..21: mol_type = other DNA
  misc_feature 1..19: note = RNA
  misc_feature 20..21: note = DNA
catagttagataagactgctt

SEQ ID NO: 700 - DNA, 21 bp, synthetic construct
  misc_feature 1..21: note = Description of Artificial Sequence: Synthetic oligonucleotide
  source 1..21: mol_type = other DNA
  misc_feature 1..19: note = RNA
  misc_feature 20..21: note = DNA
cagtcttatctaactatgatt

SEQ ID NO: 701 - DNA, 21 bp, synthetic construct
  misc_feature 1..21: note = Description of Artificial Sequence: Synthetic oligonucleotide
  source 1..21: mol_type = other DNA
  misc_feature 1..19: note = RNA
  misc_feature 20..21: note = DNA
tcatagttagataagactgtt

SEQ ID NO: 702 - DNA, 21 bp, synthetic construct
  misc_feature 1..21: note = Description of Artificial Sequence: Synthetic oligonucleotide
  source 1..21: mol_type = other DNA
  misc_feature 1..19: note = RNA
  misc_feature 20..21: note = DNA
tcttatctaactatgatgctt

SEQ ID NO: 703 - DNA, 21 bp, synthetic construct
  misc_feature 1..21: note = Description of Artificial Sequence: Synthetic oligonucleotide
  source 1..21: mol_type = other DNA
  misc_feature 1..19: note = RNA
  misc_feature 20..21: note = DNA
gcatcatagttagataagatt

SEQ ID NO: 704 - DNA, 21 bp, synthetic construct
  misc_feature 1..21: note = Description of Artificial Sequence: Synthetic oligonucleotide
  source 1..21: mol_type = other DNA
  misc_feature 1..19: note = RNA
  misc_feature 20..21: note = DNA
cttatctaactatgatgcatt

SEQ ID NO: 705 - DNA, 21 bp, synthetic construct
  misc_feature 1..21: note = Description of Artificial Sequence: Synthetic oligonucleotide
  source 1..21: mol_type = other DNA
  misc_feature 1..19: note = RNA
  misc_feature 20..21: note = DNA
tgcatcatagttagataagtt

SEQ ID NO: 706 - DNA, 21 bp, synthetic construct
  misc_feature 1..21: note = Description of Artificial Sequence: Synthetic oligonucleotide
  source 1..21: mol_type = other DNA
  misc_feature 1..19: note = RNA
  misc_feature 20..21: note = DNA
ttatctaactatgatgcaatt

SEQ ID NO: 707 - DNA, 21 bp, synthetic construct
  misc_feature 1..21: note = Description of Artificial Sequence: Synthetic oligonucleotide
  source 1..21: mol_type = other DNA
  misc_feature 1..19: note = RNA
  misc_feature 20..21: note = DNA
ttgcatcatagttagataatt

SEQ ID NO: 708 - DNA, 21 bp, synthetic construct
  misc_feature 1..21: note = Description of Artificial Sequence: Synthetic oligonucleotide
  source 1..21: mol_type = other DNA
  misc_feature 1..19: note = RNA
  misc_feature 20..21: note = DNA
tatctaactatgatgcaaatt

SEQ ID NO: 709 - DNA, 21 bp, synthetic construct
  misc_feature 1..21: note = Description of Artificial Sequence: Synthetic oligonucleotide
  source 1..21: mol_type = other DNA
  misc_feature 1..19: note = RNA
  misc_feature 20..21: note = DNA
tttgcatcatagttagatatt

SEQ ID NO: 710 - DNA, 21 bp, synthetic construct
  misc_feature 1..21: note = Description of Artificial Sequence: Synthetic oligonucleotide
  source 1..21: mol_type = other DNA
  misc_feature 1..19: note = RNA
  misc_feature 20..21: note = DNA
atctaactatgatgcaaattt

SEQ ID NO: 711 - DNA, 21 bp, synthetic construct
  misc_feature 1..21: note = Description of Artificial Sequence: Synthetic oligonucleotide
  source 1..21: mol_type = other DNA
  misc_feature 1..19: note = RNA
  misc_feature 20..21: note = DNA
atttgcatcatagttagattt

SEQ ID NO: 712 - DNA, 21 bp, synthetic construct
  misc_feature 1..21: note = Description of Artificial Sequence: Synthetic oligonucleotide
  source 1..21: mol_type = other DNA
  misc_feature 1..19: note = RNA
  misc_feature 20..21: note = DNA
tctaactatgatgcaaatatt

SEQ ID NO: 713 - DNA, 21 bp, synthetic construct
  misc_feature 1..21: note = Description of Artificial Sequence: Synthetic oligonucleotide
  source 1..21: mol_type = other DNA
  misc_feature 1..19: note = RNA
  misc_feature 20..21: note = DNA
tatttgcatcatagttagatt

SEQ ID NO: 714 - DNA, 21 bp, synthetic construct
  misc_feature 1..21: note = Description of Artificial Sequence: Synthetic oligonucleotide
  source 1..21: mol_type = other DNA
  misc_feature 1..19: note = RNA
  misc_feature 20..21: note = DNA
ctaactatgatgcaaataatt

SEQ ID NO: 715 - DNA, 21 bp, synthetic construct
  misc_feature 1..21: note = Description of Artificial Sequence: Synthetic oligonucleotide
  source 1..21: mol_type = other DNA
  misc_feature 1..19: note = RNA
  misc_feature 20..21: note = DNA
ttatttgcatcatagttagtt

SEQ ID NO: 716 - DNA, 21 bp, synthetic construct
  misc_feature 1..21: note = Description of Artificial Sequence: Synthetic oligonucleotide
  source 1..21: mol_type = other DNA
  misc_feature 1..19: note = RNA
  misc_feature 20..21: note = DNA
aactatgatgcaaataaaatt

SEQ ID NO: 717 - DNA, 21 bp, synthetic construct
  misc_feature 1..21: note = Description of Artificial Sequence: Synthetic oligonucleotide
  source 1..21: mol_type = other DNA
  misc_feature 1..19: note = RNA
  misc_feature 20..21: note = DNA
ttttatttgcatcatagtttt

SEQ ID NO: 718 - DNA, 21 bp, synthetic construct
  misc_feature 1..21: note = Description of Artificial Sequence: Synthetic oligonucleotide
  source 1..21: mol_type = other DNA
  misc_feature 1..19: note = RNA
  misc_feature 20..21: note = DNA
gatgcaaataaaaccggactt

SEQ ID NO: 719 - DNA, 21 bp, synthetic construct
  misc_feature 1..21: note = Description of Artificial Sequence: Synthetic oligonucleotide
  source 1..21: mol_type = other DNA
  misc_feature 1..19: note = RNA
  misc_feature 20..21: note = DNA
gtccggttttatttgcatctt

SEQ ID NO: 720 - DNA, 21 bp, synthetic construct
  misc_feature 1..21: note = Description of Artificial Sequence: Synthetic oligonucleotide
  source 1..21: mol_type = other DNA
  misc_feature 1..19: note = RNA
  misc_feature 20..21: note = DNA
atgcaaataaaaccggacttt

SEQ ID NO: 721 - DNA, 21 bp, synthetic construct
  misc_feature 1..21: note = Description of Artificial Sequence: Synthetic oligonucleotide
  source 1..21: mol_type = other DNA
  misc_feature 1..19: note = RNA
  misc_feature 20..21: note = DNA
agtccggttttatttgcattt

SEQ ID NO: 722 - DNA, 21 bp, synthetic construct
  misc_feature 1..21: note = Description of Artificial Sequence: Synthetic oligonucleotide
  source 1..21: mol_type = other DNA
  misc_feature 1..19: note = RNA
  misc_feature 20..21: note = DNA
tgcaaataaaaccggactgtt

SEQ ID NO: 723 - DNA, 21 bp, synthetic construct
  misc_feature 1..21: note = Description of Artificial Sequence: Synthetic oligonucleotide
  source 1..21: mol_type = other DNA
  misc_feature 1..19: note = RNA
  misc_feature 20..21: note = DNA
cagtccggttttatttgcatt

SEQ ID NO: 724 - DNA, 21 bp, synthetic construct
  misc_feature 1..21: note = Description of Artificial Sequence: Synthetic oligonucleotide
  source 1..21: mol_type = other DNA
  misc_feature 1..19: note = RNA
  misc_feature 20..21: note = DNA
caaataaaaccggactgaatt

SEQ ID NO: 725 - DNA, 21 bp, synthetic construct
  misc_feature 1..21: note = Description of Artificial Sequence: Synthetic oligonucleotide
  source 1..21: mol_type = other DNA
  misc_feature 1..19: note = RNA
  misc_feature 20..21: note = DNA
ttcagtccggttttatttgtt

SEQ ID NO: 726 - DNA, 21 bp, synthetic construct
  misc_feature 1..21: note = Description of Artificial Sequence: Synthetic oligonucleotide
  source 1..21: mol_type = other DNA
  misc_feature 1..19: note = RNA
  misc_feature 20..21: note = DNA
aaataaaaccggactgaagtt

SEQ ID NO: 727 - DNA, 21 bp, synthetic construct
  misc_feature 1..21: note = Description of Artificial Sequence: Synthetic oligonucleotide
  source 1..21: mol_type = other DNA
  misc_feature 1..19: note = RNA
  misc_feature 20..21: note = DNA
cttcagtccggttttattttt

SEQ ID NO: 728 - DNA, 21 bp, synthetic construct
  misc_feature 1..21: note = Description of Artificial Sequence: Synthetic oligonucleotide
  source 1..21: mol_type = other DNA
  misc_feature 1..19: note = RNA
  misc_feature 20..21: note = DNA
aataaaaccggactgaaggtt

SEQ ID NO: 729 - DNA, 21 bp, synthetic construct
  misc_feature 1..21: note = Description of Artificial Sequence: Synthetic oligonucleotide
  source 1..21: mol_type = other DNA
  misc_feature 1..19: note = RNA
  misc_feature 20..21: note = DNA
ccttcagtccggttttatttt

SEQ ID NO: 730 - DNA, 21 bp, synthetic construct
  misc_feature 1..21: note = Description of Artificial Sequence: Synthetic oligonucleotide
  source 1..21: mol_type = other DNA
  misc_feature 1..19: note = RNA
  misc_feature 20..21: note = DNA
taaaaccggactgaaggagtt

SEQ ID NO: 731 - DNA, 21 bp, synthetic construct
  misc_feature 1..21: note = Description of Artificial Sequence: Synthetic oligonucleotide
  source 1..21: mol_type = other DNA
  misc_feature 1..19: note = RNA
  misc_feature 20..21: note = DNA
ctccttcagtccggttttatt

SEQ ID NO: 732 - DNA, 21 bp, synthetic construct
  misc_feature 1..21: note = Description of Artificial Sequence: Synthetic oligonucleotide
  source 1..21: mol_type = other DNA
  misc_feature 1..19: note = RNA
  misc_feature 20..21: note = DNA
aaaaccggactgaaggagctt

SEQ ID NO: 733 - DNA, 21 bp, synthetic construct
  misc_feature 1..21: note = Description of Artificial Sequence: Synthetic oligonucleotide
  source 1..21: mol_type = other DNA
  misc_feature 1..19: note = RNA
  misc_feature 20..21: note = DNA
gctccttcagtccggtttttt

SEQ ID NO: 734 - DNA, 21 bp, synthetic construct
  misc_feature 1..21: note = Description of Artificial Sequence: Synthetic oligonucleotide
  source 1..21: mol_type = other DNA
  misc_feature 1..19: note = RNA
  misc_feature 20..21: note = DNA
aaaccggactgaaggagcttt

SEQ ID NO: 735 - DNA, 21 bp, synthetic construct
  misc_feature 1..21: note = Description of Artificial Sequence: Synthetic oligonucleotide
  source 1..21: mol_type = other DNA
  misc_feature 1..19: note = RNA
  misc_feature 20..21: note = DNA
agctccttcagtccggttttt

SEQ ID NO: 736 - DNA, 21 bp, synthetic construct
  misc_feature 1..21: note = Description of Artificial Sequence: Synthetic oligonucleotide
  source 1..21: mol_type = other DNA
  misc_feature 1..19: note = RNA
  misc_feature 20..21: note = DNA
aaccggactgaaggagctgtt

SEQ ID NO: 737 - DNA, 21 bp, synthetic construct
  misc_feature 1..21: note = Description of Artificial Sequence: Synthetic oligonucleotide
  source 1..21: mol_type = other DNA
  misc_feature 1..19: note = RNA
  misc_feature 20..21: note = DNA
cagctccttcagtccggtttt

SEQ ID NO: 738 - DNA, 21 bp, synthetic construct
  misc_feature 1..21: note = Description of Artificial Sequence: Synthetic oligonucleotide
  source 1..21: mol_type = other DNA
  misc_feature 1..19: note = RNA
  misc_feature 20..21: note = DNA
aggagctgcccatgagaaatt

SEQ ID NO: 739 - DNA, 21 bp, synthetic construct
  misc_feature 1..21: note = Description of Artificial Sequence: Synthetic oligonucleotide
  source 1..21: mol_type = other DNA
  misc_feature 1..19: note = RNA
  misc_feature 20..21: note = DNA
tttctcatgggcagctccttt

SEQ ID NO: 740 - DNA, 21 bp, synthetic construct
  misc_feature 1..21: note = Description of Artificial Sequence: Synthetic oligonucleotide
  source 1..21: mol_type = other DNA
  misc_feature 1..19: note = RNA
  misc_feature 20..21: note = DNA
tacaggaaatcctgcatggtt

SEQ ID NO: 741 - DNA, 21 bp, synthetic construct
  misc_feature 1..21: note = Description of Artificial Sequence: Synthetic oligonucleotide
  source 1..21: mol_type = other DNA
  misc_feature 1..19: note = RNA
  misc_feature 20..21: note = DNA
ccatgcaggatttcctgtatt

SEQ ID NO: 742 - DNA, 21 bp, synthetic construct
  misc_feature 1..21: note = Description of Artificial Sequence: Synthetic oligonucleotide
  source 1..21: mol_type = other DNA
  misc_feature 1..19: note = RNA
  misc_feature 20..21: note = DNA
aggaaatcctgcatggcgctt

SEQ ID NO: 743 - DNA, 21 bp, synthetic construct
  misc_feature 1..21: note = Description of Artificial Sequence: Synthetic oligonucleotide
  source 1..21: mol_type = other DNA
  misc_feature 1..19: note = RNA
  misc_feature 20..21: note = DNA
gcgccatgcaggatttccttt

SEQ ID NO: 744 - DNA, 21 bp, synthetic construct
  misc_feature 1..21: note = Description of Artificial Sequence: Synthetic oligonucleotide
  source 1..21: mol_type = other DNA
  misc_feature 1..19: note = RNA
  misc_feature 20..21: note = DNA
ggaaatcctgcatggcgcctt

SEQ ID NO: 745 - DNA, 21 bp, synthetic construct
  misc_feature 1..21: note = Description of Artificial Sequence: Synthetic oligonucleotide
  source 1..21: mol_type = other DNA
  misc_feature 1..19: note = RNA
  misc_feature 20..21: note = DNA
ggcgccatgcaggatttcctt

SEQ ID NO: 746 - DNA, 21 bp, synthetic construct
  misc_feature 1..21: note = Description of Artificial Sequence: Synthetic oligonucleotide
  source 1..21: mol_type = other DNA
  misc_feature 1..19: note = RNA
  misc_feature 20..21: note = DNA
gaaatcctgcatggcgccgtt

SEQ ID NO: 747 - DNA, 21 bp, synthetic construct
  misc_feature 1..21: note = Description of Artificial Sequence: Synthetic oligonucleotide
  source 1..21: mol_type = other DNA
  misc_feature 1..19: note = RNA
  misc_feature 20..21: note = DNA
cggcgccatgcaggatttctt

SEQ ID NO: 748 - DNA, 21 bp, synthetic construct
  misc_feature 1..21: note = Description of Artificial Sequence: Synthetic oligonucleotide
  source 1..21: mol_type = other DNA
  misc_feature 1..19: note = RNA
  misc_feature 20..21: note = DNA
aaatcctgcatggcgccgttt

SEQ ID NO: 749 - DNA, 21 bp, synthetic construct
  misc_feature 1..21: note = Description of Artificial Sequence: Synthetic oligonucleotide
  source 1..21: mol_type = other DNA
  misc_feature 1..19: note = RNA
  misc_feature 20..21: note = DNA
acggcgccatgcaggattttt

SEQ ID NO: 750 - DNA, 21 bp, synthetic construct
  misc_feature 1..21: note = Description of Artificial Sequence: Synthetic oligonucleotide
  source 1..21: mol_type = other DNA
  misc_feature 1..19: note = RNA
  misc_feature 20..21: note = DNA
aatcctgcatggcgccgtgtt

SEQ ID NO: 751 - DNA, 21 bp, synthetic construct
  misc_feature 1..21: note = Description of Artificial Sequence: Synthetic oligonucleotide
  source 1..21: mol_type = other DNA
  misc_feature 1..19: note = RNA
  misc_feature 20..21: note = DNA
cacggcgccatgcaggatttt

SEQ ID NO: 752 - DNA, 21 bp, synthetic construct
  misc_feature 1..21: note = Description of Artificial Sequence: Synthetic oligonucleotide
  source 1..21: mol_type = other DNA
  misc_feature 1..19: note = RNA
  misc_feature 20..21: note = DNA
tcctgcatggcgccgtgcgtt

SEQ ID NO: 753 - DNA, 21 bp, synthetic construct
  misc_feature 1..21: note = Description of Artificial Sequence: Synthetic oligonucleotide
  source 1..21: mol_type = other DNA
  misc_feature 1..19: note = RNA
  misc_feature 20..21: note = DNA
cgcacggcgccatgcaggatt

SEQ ID NO: 754 - DNA, 21 bp, synthetic construct
  misc_feature 1..21: note = Description of Artificial Sequence: Synthetic oligonucleotide
  source 1..21: mol_type = other DNA
  misc_feature 1..19: note = RNA
  misc_feature 20..21: note = DNA
ctgcatggcgccgtgcggttt

SEQ ID NO: 755 - DNA, 21 bp, synthetic construct
  misc_feature 1..21: note = Description of Artificial Sequence: Synthetic oligonucleotide
  source 1..21: mol_type = other DNA
  misc_feature 1..19: note = RNA
  misc_feature 20..21: note = DNA
accgcacggcgccatgcagtt

SEQ ID NO: 756 - DNA, 21 bp, synthetic construct
  misc_feature 1..21: note = Description of Artificial Sequence: Synthetic oligonucleotide
  source 1..21: mol_type = other DNA
  misc_feature 1..19: note = RNA
  misc_feature 20..21: note = DNA
tgcatggcgccgtgcggtttt

SEQ ID NO: 757 - DNA, 21 bp, synthetic construct
  misc_feature 1..21: note = Description of Artificial Sequence: Synthetic oligonucleotide
  source 1..21: mol_type = other DNA
  misc_feature 1..19: note = RNA
  misc_feature 20..21: note = DNA
aaccgcacggcgccatgcatt

SEQ ID NO: 758 - DNA, 21 bp, synthetic construct
  misc_feature 1..21: note = Description of Artificial Sequence: Synthetic oligonucleotide
  source 1..21: mol_type = other DNA
  misc_feature 1..19: note = RNA
  misc_feature 20..21: note = DNA
gcatggcgccgtgcggttctt

SEQ ID NO: 759 - DNA, 21 bp, synthetic construct
  misc_feature 1..21: note = Description of Artificial Sequence: Synthetic oligonucleotide
  source 1..21: mol_type = other DNA
  misc_feature 1..19: note = RNA
  misc_feature 20..21: note = DNA
gaaccgcacggcgccatgctt

SEQ ID NO: 760 - DNA, 21 bp, synthetic construct
  misc_feature 1..21: note = Description of Artificial Sequence: Synthetic oligonucleotide
  source 1..21: mol_type = other DNA
  misc_feature 1..19: note = RNA
  misc_feature 20..21: note = DNA
atggcgccgtgcggttcagtt

SEQ ID NO: 761 - DNA, 21 bp, synthetic construct
  misc_feature 1..21: note = Description of Artificial Sequence: Synthetic oligonucleotide
  source 1..21: mol_type = other DNA
  misc_feature 1..19: note = RNA
  misc_feature 20..21: note = DNA
ctgaaccgcacggcgccattt

SEQ ID NO: 762 - DNA, 21 bp, synthetic construct
  misc_feature 1..21: note = Description of Artificial Sequence: Synthetic oligonucleotide
  source 1..21: mol_type = other DNA
  misc_feature 1..19: note = RNA
  misc_feature 20..21: note = DNA
tggcgccgtgcggttcagctt

SEQ ID NO: 763 - DNA, 21 bp, synthetic construct
  misc_feature 1..21: note = Description of Artificial Sequence: Synthetic oligonucleotide
  source 1..21: mol_type = other DNA
  misc_feature 1..19: note = RNA
  misc_feature 20..21: note = DNA
gctgaaccgcacggcgccatt

SEQ ID NO: 764 - DNA, 21 bp, synthetic construct
  misc_feature 1..21: note = Description of Artificial Sequence: Synthetic oligonucleotide
  source 1..21: mol_type = other DNA
  misc_feature 1..19: note = RNA
  misc_feature 20..21: note = DNA
ggcgccgtgcggttcagcatt

SEQ ID NO: 765 - DNA, 21 bp, synthetic construct
  misc_feature 1..21: note = Description of Artificial Sequence: Synthetic oligonucleotide
  source 1..21: mol_type = other DNA
  misc_feature 1..19: note = RNA
  misc_feature 20..21: note = DNA
tgctgaaccgcacggcgcctt

SEQ ID NO: 766 - DNA, 21 bp, synthetic construct
  misc_feature 1..21: note = Description of Artificial Sequence: Synthetic oligonucleotide
  source 1..21: mol_type = other DNA
  misc_feature 1..19: note = RNA
  misc_feature 20..21: note = DNA
gcgccgtgcggttcagcaatt

SEQ ID NO: 767 - DNA, 21 bp, synthetic construct
  misc_feature 1..21: note = Description of Artificial Sequence: Synthetic oligonucleotide
  source 1..21: mol_type = other DNA
  misc_feature 1..19: note = RNA
  misc_feature 20..21: note = DNA
ttgctgaaccgcacggcgctt

SEQ ID NO: 768 - DNA, 21 bp, synthetic construct
  misc_feature 1..21: note = Description of Artificial Sequence: Synthetic oligonucleotide
  source 1..21: mol_type = other DNA
  misc_feature 1..19: note = RNA
  misc_feature 20..21: note = DNA
cgccgtgcggttcagcaactt

SEQ ID NO: 769 - DNA, 21 bp, synthetic construct
  misc_feature 1..21: note = Description of Artificial Sequence: Synthetic oligonucleotide
  source 1..21: mol_type = other DNA
  misc_feature 1..19: note = RNA
  misc_feature 20..21: note = DNA
gttgctgaaccgcacggcgtt

SEQ ID NO: 770 - DNA, 21 bp, synthetic construct
  misc_feature 1..21: note = Description of Artificial Sequence: Synthetic oligonucleotide
  source 1..21: mol_type = other DNA
  misc_feature 1..19: note = RNA
  misc_feature 20..21: note = DNA
gccgtgcggttcagcaacatt

SEQ ID NO: 771 - DNA, 21 bp, synthetic construct
  misc_feature 1..21: note = Description of Artificial Sequence: Synthetic oligonucleotide
  source 1..21: mol_type = other DNA
  misc_feature 1..19: note = RNA
  misc_feature 20..21: note = DNA
tgttgctgaaccgcacggctt

SEQ ID NO: 772 - DNA, 21 bp, synthetic construct
  misc_feature 1..21: note = Description of Artificial Sequence: Synthetic oligonucleotide
  source 1..21: mol_type = other DNA
  misc_feature 1..19: note = RNA
  misc_feature 20..21: note = DNA
ccgtgcggttcagcaacaatt

SEQ ID NO: 773 - DNA, 21 bp, synthetic construct
  misc_feature 1..21: note = Description of Artificial Sequence: Synthetic oligonucleotide
  source 1..21: mol_type = other DNA
  misc_feature 1..19: note = RNA
  misc_feature 20..21: note = DNA
ttgttgctgaaccgcacggtt

SEQ ID NO: 774 - DNA, 21 bp, synthetic construct
  misc_feature 1..21: note = Description of Artificial Sequence: Synthetic oligonucleotide
  source 1..21: mol_type = other DNA
  misc_feature 1..19: note = RNA
  misc_feature 20..21: note = DNA
gtgcggttcagcaacaacctt

SEQ ID NO: 775 - DNA, 21 bp, synthetic construct
  misc_feature 1..21: note = Description of Artificial Sequence: Synthetic oligonucleotide
  source 1..21: mol_type = other DNA
  misc_feature 1..19: note = RNA
  misc_feature 20..21: note = DNA
ggttgttgctgaaccgcactt

SEQ ID NO: 776 - DNA, 21 bp, synthetic construct
  misc_feature 1..21: note = Description of Artificial Sequence: Synthetic oligonucleotide
  source 1..21: mol_type = other DNA
  misc_feature 1..19: note = RNA
  misc_feature 20..21: note = DNA
gcggttcagcaacaacccttt

SEQ ID NO: 777 - DNA, 21 bp, synthetic construct
  misc_feature 1..21: note = Description of Artificial Sequence: Synthetic oligonucleotide
  source 1..21: mol_type = other DNA
  misc_feature 1..19: note = RNA
  misc_feature 20..21: note = DNA
agggttgttgctgaaccgctt

SEQ ID NO: 778 - DNA, 21 bp, synthetic construct
  misc_feature 1..21: note = Description of Artificial Sequence: Synthetic oligonucleotide
  source 1..21: mol_type = other DNA
  misc_feature 1..19: note = RNA
  misc_feature 20..21: note = DNA
ggttcagcaacaaccctgctt

SEQ ID NO: 779 - DNA, 21 bp, synthetic construct
  misc_feature 1..21: note = Description of Artificial Sequence: Synthetic oligonucleotide
  source 1..21: mol_type = other DNA
  misc_feature 1..19: note = RNA
  misc_feature 20..21: note = DNA
gcagggttgttgctgaacctt

SEQ ID NO: 780 - DNA, 21 bp, synthetic construct
  misc_feature 1..21: note = Description of Artificial Sequence: Synthetic oligonucleotide
  source 1..21: mol_type = other DNA
  misc_feature 1..19: note = RNA
  misc_feature 20..21: note = DNA
gcaacaaccctgccctgtgtt

SEQ ID NO: 781 - DNA, 21 bp, synthetic construct
  misc_feature 1..21: note = Description of Artificial Sequence: Synthetic oligonucleotide
  source 1..21: mol_type = other DNA
  misc_feature 1..19: note = RNA
  misc_feature 20..21: note = DNA
cacagggcagggttgttgctt

SEQ ID NO: 782 - DNA, 21 bp, synthetic construct
  misc_feature 1..21: note = Description of Artificial Sequence: Synthetic oligonucleotide
  source 1..21: mol_type = other DNA
  misc_feature 1..19: note = RNA
  misc_feature 20..21: note = DNA
aacaaccctgccctgtgcatt

SEQ ID NO: 783 - DNA, 21 bp, synthetic construct
  misc_feature 1..21: note = Description of Artificial Sequence: Synthetic oligonucleotide
  source 1..21: mol_type = other DNA
  misc_feature 1..19: note = RNA
  misc_feature 20..21: note = DNA
tgcacagggcagggttgtttt

SEQ ID NO: 784 - DNA, 21 bp, synthetic construct
  misc_feature 1..21: note = Description of Artificial Sequence: Synthetic oligonucleotide
  source 1..21: mol_type = other DNA
  misc_feature 1..19: note = RNA
  misc_feature 20..21: note = DNA
acgtggagagcatccagtgtt

SEQ ID NO: 785 - DNA, 21 bp, synthetic construct
  misc_feature 1..21: note = Description of Artificial Sequence: Synthetic oligonucleotide
  source 1..21: mol_type = other DNA
  misc_feature 1..19: note = RNA
  misc_feature 20..21: note = DNA
cactggatgctctccacgttt

SEQ ID NO: 786 - DNA, 21 bp, synthetic construct
  misc_feature 1..21: note = Description of Artificial Sequence: Synthetic oligonucleotide
  source 1..21: mol_type = other DNA
  misc_feature 1..19: note = RNA
  misc_feature 20..21: note = DNA
cgtggagagcatccagtggtt

SEQ ID NO: 787 - DNA, 21 bp, synthetic construct
  misc_feature 1..21: note = Description of Artificial Sequence: Synthetic oligonucleotide
  source 1..21: mol_type = other DNA
  misc_feature 1..19: note = RNA
  misc_feature 20..21: note = DNA
ccactggatgctctccacgtt

SEQ ID NO: 788 - DNA, 21 bp, synthetic construct
  misc_feature 1..21: note = Description of Artificial Sequence: Synthetic oligonucleotide
  source 1..21: mol_type = other DNA
  misc_feature 1..19: note = RNA
  misc_feature 20..21: note = DNA
gtggagagcatccagtggctt

SEQ ID NO: 789 - DNA, 21 bp, synthetic construct
  misc_feature 1..21: note = Description of Artificial Sequence: Synthetic oligonucleotide
  source 1..21: mol_type = other DNA
  misc_feature 1..19: note = RNA
  misc_feature 20..21: note = DNA
gccactggatgctctccactt

SEQ ID NO: 790 - DNA, 21 bp, synthetic construct
  misc_feature 1..21: note = Description of Artificial Sequence: Synthetic oligonucleotide
  source 1..21: mol_type = other DNA
  misc_feature 1..19: note = RNA
  misc_feature 20..21: note = DNA
gagagcatccagtggcgggtt

SEQ ID NO: 791 - DNA, 21 bp, synthetic construct
  misc_feature 1..21: note = Description of Artificial Sequence: Synthetic oligonucleotide
  source 1..21: mol_type = other DNA
  misc_feature 1..19: note = RNA
  misc_feature 20..21: note = DNA
cccgccactggatgctctctt

SEQ ID NO: 792 - DNA, 21 bp, synthetic construct
  misc_feature 1..21: note = Description of Artificial Sequence: Synthetic oligonucleotide
  source 1..21: mol_type = other DNA
  misc_feature 1..19: note = RNA
  misc_feature 20..21: note = DNA
agagcatccagtggcgggatt

SEQ ID NO: 793 - DNA, 21 bp, synthetic construct
  misc_feature 1..21: note = Description of Artificial Sequence: Synthetic oligonucleotide
  source 1..21: mol_type = other DNA
  misc_feature 1..19: note = RNA
  misc_feature 20..21: note = DNA
tcccgccactggatgctcttt

SEQ ID NO: 794 - DNA, 21 bp, synthetic construct
  misc_feature 1..21: note = Description of Artificial Sequence: Synthetic oligonucleotide
  source 1..21: mol_type = other DNA
  misc_feature 1..19: note = RNA
  misc_feature 20..21: note = DNA
gagcatccagtggcgggactt

SEQ ID NO: 795 - DNA, 21 bp, synthetic construct
  misc_feature 1..21: note = Description of Artificial Sequence: Synthetic oligonucleotide
  source 1..21: mol_type = other DNA
  misc_feature 1..19: note = RNA
  misc_feature 20..21: note = DNA
gtcccgccactggatgctctt

SEQ ID NO: 796 - DNA, 21 bp, synthetic construct
  misc_feature 1..21: note = Description of Artificial Sequence: Synthetic oligonucleotide
  source 1..21: mol_type = other DNA
  misc_feature 1..19: note = RNA
  misc_feature 20..21: note = DNA
cagtggcgggacatagtcatt

SEQ ID NO: 797 - DNA, 21 bp, synthetic construct
  misc_feature 1..21: note = Description of Artificial Sequence: Synthetic oligonucleotide
  source 1..21: mol_type = other DNA
  misc_feature 1..19: note = RNA
  misc_feature 20..21: note = DNA
tgactatgtcccgccactgtt

SEQ ID NO: 798 - DNA, 21 bp, synthetic construct
  misc_feature 1..21: note = Description of Artificial Sequence: Synthetic oligonucleotide
  source 1..21: mol_type = other DNA
  misc_feature 1..19: note = RNA
  misc_feature 20..21: note = DNA
agtggcgggacatagtcagtt

SEQ ID NO: 799 - DNA, 21 bp, synthetic construct
  misc_feature 1..21: note = Description of Artificial Sequence: Synthetic oligonucleotide
  source 1..21: mol_type = other DNA
  misc_feature 1..19: note = RNA
  misc_feature 20..21: note = DNA
ctgactatgtcccgccacttt

SEQ ID NO: 800 - DNA, 21 bp, synthetic construct
  misc_feature 1..21: note = Description of Artificial Sequence: Synthetic oligonucleotide
  source 1..21: mol_type = other DNA
  misc_feature 1..19: note = RNA
  misc_feature 20..21: note = DNA
tggcgggacatagtcagcatt

SEQ ID NO: 801 - DNA, 21 bp, synthetic construct
  misc_feature 1..21: note = Description of Artificial Sequence: Synthetic oligonucleotide
  source 1..21: mol_type = other DNA
  misc_feature 1..19: note = RNA
  misc_feature 20..21: note = DNA
tgctgactatgtcccgccatt

SEQ ID NO: 802 - DNA, 21 bp, synthetic construct
  misc_feature 1..21: note = Description of Artificial Sequence: Synthetic oligonucleotide
  source 1..21: mol_type = other DNA
  misc_feature 1..19: note = RNA
  misc_feature 20..21: note = DNA
ggcgggacatagtcagcagtt

SEQ ID NO: 803 - DNA, 21 bp, synthetic construct
  misc_feature 1..21: note = Description of Artificial Sequence: Synthetic oligonucleotide
  source 1..21: mol_type = other DNA
  misc_feature 1..19: note = RNA
  misc_feature 20..21: note = DNA
ctgctgactatgtcccgcctt

SEQ ID NO: 804 - DNA, 21 bp, synthetic construct
  misc_feature 1..21: note = Description of Artificial Sequence: Synthetic oligonucleotide
  source 1..21: mol_type = other DNA
  misc_feature 1..19: note = RNA
  misc_feature 20..21: note = DNA
ctcagcaacatgtcgatggtt

SEQ ID NO: 805 - DNA, 21 bp, synthetic construct
  misc_feature 1..21: note = Description of Artificial Sequence: Synthetic oligonucleotide
  source 1..21: mol_type = other DNA
  misc_feature 1..19: note = RNA
  misc_feature 20..21: note = DNA
ccatcgacatgttgctgagtt

SEQ ID NO: 806 - DNA, 21 bp, synthetic construct
  misc_feature 1..21: note = Description of Artificial Sequence: Synthetic oligonucleotide
  source 1..21: mol_type = other DNA
  misc_feature 1..19: note = RNA
  misc_feature 20..21: note = DNA
cagcaacatgtcgatggactt

SEQ ID NO: 807 - DNA, 21 bp, synthetic construct
  misc_feature 1..21: note = Description of Artificial Sequence: Synthetic oligonucleotide
  source 1..21: mol_type = other DNA
  misc_feature 1..19: note = RNA
  misc_feature 20..21: note = DNA
gtccatcgacatgttgctgtt

SEQ ID NO: 808 - DNA, 21 bp, synthetic construct
  misc_feature 1..21: note = Description of Artificial Sequence: Synthetic oligonucleotide
  source 1..21: mol_type = other DNA
  misc_feature 1..19: note = RNA
  misc_feature 20..21: note = DNA
agcaacatgtcgatggacttt

SEQ ID NO: 809 - DNA, 21 bp, synthetic construct
  misc_feature 1..21: note = Description of Artificial Sequence: Synthetic oligonucleotide
  source 1..21: mol_type = other DNA
  misc_feature 1..19: note = RNA
  misc_feature 20..21: note = DNA
agtccatcgacatgttgcttt

SEQ ID NO: 810 - DNA, 21 bp, synthetic construct
  misc_feature 1..21: note = Description of Artificial Sequence: Synthetic oligonucleotide
  source 1..21: mol_type = other DNA
  misc_feature 1..19: note = RNA
  misc_feature 20..21: note = DNA
gcaacatgtcgatggactttt

SEQ ID NO: 811 - DNA, 21 bp, synthetic construct
  misc_feature 1..21: note = Description of Artificial Sequence: Synthetic oligonucleotide
  source 1..21: mol_type = other DNA
  misc_feature 1..19: note = RNA
  misc_feature 20..21: note = DNA
aagtccatcgacatgttgctt

SEQ ID NO: 812 - DNA, 21 bp, synthetic construct
  misc_feature 1..21: note = Description of Artificial Sequence: Synthetic oligonucleotide
  source 1..21: mol_type = other DNA
  misc_feature 1..19: note = RNA
  misc_feature 20..21: note = DNA
aacatgtcgatggacttcctt

SEQ ID NO: 813 - DNA, 21 bp, synthetic construct
  misc_feature 1..21: note = Description of Artificial Sequence: Synthetic oligonucleotide
  source 1..21: mol_type = other DNA
  misc_feature 1..19: note = RNA
  misc_feature 20..21: note = DNA
ggaagtccatcgacatgtttt

SEQ ID NO: 814 - DNA, 21 bp, synthetic construct
  misc_feature 1..21: note = Description of Artificial Sequence: Synthetic oligonucleotide
  source 1..21: mol_type = other DNA
  misc_feature 1..19: note = RNA
  misc_feature 20..21: note = DNA
acatgtcgatggacttccatt

SEQ ID NO: 815 - DNA, 21 bp, synthetic construct
  misc_feature 1..21: note = Description of Artificial Sequence: Synthetic oligonucleotide
  source 1..21: mol_type = other DNA
  misc_feature 1..19: note = RNA
  misc_feature 20..21: note = DNA
tggaagtccatcgacatgttt

SEQ ID NO: 816 - DNA, 21 bp, synthetic construct
  misc_feature 1..21: note = Description of Artificial Sequence: Synthetic oligonucleotide
  source 1..21: mol_type = other DNA
  misc_feature 1..19: note = RNA
  misc_feature 20..21: note = DNA
catgtcgatggacttccagtt

SEQ ID NO: 817 - DNA, 21 bp, synthetic construct
  misc_feature 1..21: note = Description of Artificial Sequence: Synthetic oligonucleotide
  source 1..21: mol_type = other DNA
  misc_feature 1..19: note = RNA
  misc_feature 20..21: note = DNA
ctggaagtccatcgacatgtt

SEQ ID NO: 818 - DNA, 21 bp, synthetic construct
  misc_feature 1..21: note = Description of Artificial Sequence: Synthetic oligonucleotide
  source 1..21: mol_type = other DNA
  misc_feature 1..19: note = RNA
  misc_feature 20..21: note = DNA
atgtcgatggacttccagatt

SEQ ID NO: 819 - DNA, 21 bp, synthetic construct
  misc_feature 1..21: note = Description of Artificial Sequence: Synthetic oligonucleotide
  source 1..21: mol_type = other DNA
  misc_feature 1..19: note = RNA
  misc_feature 20..21: note = DNA
tctggaagtccatcgacattt

SEQ ID NO: 820 - DNA, 21 bp, synthetic construct
  misc_feature 1..21: note = Description of Artificial Sequence: Synthetic oligonucleotide
  source 1..21: mol_type = other DNA
  misc_feature 1..19: note = RNA
  misc_feature 20..21: note = DNA
tcgatggacttccagaacctt

SEQ ID NO: 821 - DNA, 21 bp, synthetic construct
  misc_feature 1..21: note = Description of Artificial Sequence: Synthetic oligonucleotide
  source 1..21: mol_type = other DNA
  misc_feature 1..19: note = RNA
  misc_feature 20..21: note = DNA
ggttctggaagtccatcgatt

SEQ ID NO: 822 - DNA, 21 bp, synthetic construct
  misc_feature 1..21: note = Description of Artificial Sequence: Synthetic oligonucleotide
  source 1..21: mol_type = other DNA
  misc_feature 1..19: note = RNA
  misc_feature 20..21: note = DNA
gaaccacctgggcagctgctt

SEQ ID NO: 823 - DNA, 21 bp, synthetic construct
  misc_feature 1..21: note = Description of Artificial Sequence: Synthetic oligonucleotide
  source 1..21: mol_type = other DNA
  misc_feature 1..19: note = RNA
  misc_feature 20..21: note = DNA
gcagctgcccaggtggttctt

SEQ ID NO: 824 - DNA, 21 bp, synthetic construct
  misc_feature 1..21: note = Description of Artificial Sequence: Synthetic oligonucleotide
  source 1..21: mol_type = other DNA
  misc_feature 1..19: note = RNA
  misc_feature 20..21: note = DNA
gggcagctgccaaaagtgttt

SEQ ID NO: 825 - DNA, 21 bp, synthetic construct
  misc_feature 1..21: note = Description of Artificial Sequence: Synthetic oligonucleotide
  source 1..21: mol_type = other DNA
  misc_feature 1..19: note = RNA
  misc_feature 20..21: note = DNA
acacttttggcagctgccctt

SEQ ID NO: 826 - DNA, 21 bp, synthetic construct
  misc_feature 1..21: note = Description of Artificial Sequence: Synthetic oligonucleotide
  source 1..21: mol_type = other DNA
  misc_feature 1..19: note = RNA
  misc_feature 20..21: note = DNA
gcagctgccaaaagtgtgatt

SEQ ID NO: 827 - DNA, 21 bp, synthetic construct
  misc_feature 1..21: note = Description of Artificial Sequence: Synthetic oligonucleotide
  source 1..21: mol_type = other DNA
  misc_feature 1..19: note = RNA
  misc_feature 20..21: note = DNA
tcacacttttggcagctgctt

SEQ ID NO: 828 - DNA, 21 bp, synthetic construct
  misc_feature 1..21: note = Description of Artificial Sequence: Synthetic oligonucleotide
  source 1..21: mol_type = other DNA
  misc_feature 1..19: note = RNA
  misc_feature 20..21: note = DNA
tgccaaaagtgtgatccaatt

SEQ ID NO: 829 - DNA, 21 bp, synthetic construct
  misc_feature 1..21: note = Description of Artificial Sequence: Synthetic oligonucleotide
  source 1..21: mol_type = other DNA
  misc_feature 1..19: note = RNA
  misc_feature 20..21: note = DNA
ttggatcacacttttggcatt

SEQ ID NO: 830 - DNA, 21 bp, synthetic construct
  misc_feature 1..21: note = Description of Artificial Sequence: Synthetic oligonucleotide
  source 1..21: mol_type = other DNA
  misc_feature 1..19: note = RNA
  misc_feature 20..21: note = DNA
gccaaaagtgtgatccaagtt

SEQ ID NO: 831 - DNA, 21 bp, synthetic construct
  misc_feature 1..21: note = Description of Artificial Sequence: Synthetic oligonucleotide
  source 1..21: mol_type = other DNA
  misc_feature 1..19: note = RNA
  misc_feature 20..21: note = DNA
cttggatcacacttttggctt

SEQ ID NO: 832 - DNA, 21 bp, synthetic construct
  misc_feature 1..21: note = Description of Artificial Sequence: Synthetic oligonucleotide
  source 1..21: mol_type = other DNA
  misc_feature 1..19: note = RNA
  misc_feature 20..21: note = DNA
ccaaaagtgtgatccaagctt

SEQ ID NO: 833 - DNA, 21 bp, synthetic construct
  misc_feature 1..21: note = Description of Artificial Sequence: Synthetic oligonucleotide
  source 1..21: mol_type = other DNA
  misc_feature 1..19: note = RNA
  misc_feature 20..21: note = DNA
gcttggatcacacttttggtt

SEQ ID NO: 834 - DNA, 21 bp, synthetic construct
  misc_feature 1..21: note = Description of Artificial Sequence: Synthetic oligonucleotide
  source 1..21: mol_type = other DNA
  misc_feature 1..19: note = RNA
  misc_feature 20..21: note = DNA
aaagtgtgatccaagctgttt

SEQ ID NO: 835 - DNA, 21 bp, synthetic construct
  misc_feature 1..21: note = Description of Artificial Sequence: Synthetic oligonucleotide
  source 1..21: mol_type = other DNA
  misc_feature 1..19: note = RNA
  misc_feature 20..21: note = DNA
acagcttggatcacacttttt

SEQ ID NO: 836 - DNA, 21 bp, synthetic construct
  misc_feature 1..21: note = Description of Artificial Sequence: Synthetic oligonucleotide
  source 1..21: mol_type = other DNA
  misc_feature 1..19: note = RNA
  misc_feature 20..21: note = DNA
tgtgatccaagctgtcccatt

SEQ ID NO: 837 - DNA, 21 bp, synthetic construct
  misc_feature 1..21: note = Description of Artificial Sequence: Synthetic oligonucleotide
  source 1..21: mol_type = other DNA
  misc_feature 1..19: note = RNA
  misc_feature 20..21: note = DNA
tgggacagcttggatcacatt

SEQ ID NO: 838 - DNA, 21 bp, synthetic construct
  misc_feature 1..21: note = Description of Artificial Sequence: Synthetic oligonucleotide
  source 1..21: mol_type = other DNA
  misc_feature 1..19: note = RNA
  misc_feature 20..21: note = DNA
gtgatccaagctgtcccaatt

SEQ ID NO: 839 - DNA, 21 bp, synthetic construct
  misc_feature 1..21: note = Description of Artificial Sequence: Synthetic oligonucleotide
  source 1..21: mol_type = other DNA
  misc_feature 1..19: note = RNA
  misc_feature 20..21: note = DNA
ttgggacagcttggatcactt

SEQ ID NO: 840 - DNA, 21 bp, synthetic construct
  misc_feature 1..21: note = Description of Artificial Sequence: Synthetic oligonucleotide
  source 1..21: mol_type = other DNA
  misc_feature 1..19: note = RNA
  misc_feature 20..21: note = DNA
gatccaagctgtcccaatgtt

SEQ ID NO: 841 - DNA, 21 bp, synthetic construct
  misc_feature 1..21: note = Description of Artificial Sequence: Synthetic oligonucleotide
  source 1..21: mol_type = other DNA
  misc_feature 1..19: note = RNA
  misc_feature 20..21: note = DNA
cattgggacagcttggatctt

SEQ ID NO: 842 - DNA, 21 bp, synthetic construct
  misc_feature 1..21: note = Description of Artificial Sequence: Synthetic oligonucleotide
  source 1..21: mol_type = other DNA
  misc_feature 1..19: note = RNA
  misc_feature 20..21: note = DNA
atccaagctgtcccaatggtt

SEQ ID NO: 843 - DNA, 21 bp, synthetic construct
  misc_feature 1..21: note = Description of Artificial Sequence: Synthetic oligonucleotide
  source 1..21: mol_type = other DNA
  misc_feature 1..19: note = RNA
  misc_feature 20..21: note = DNA
ccattgggacagcttggattt

SEQ ID NO: 844 - DNA, 21 bp, synthetic construct
  misc_feature 1..21: note = Description of Artificial Sequence: Synthetic oligonucleotide
  source 1..21: mol_type = other DNA
  misc_feature 1..19: note = RNA
  misc_feature 20..21: note = DNA
tccaagctgtcccaatgggtt

SEQ ID NO: 845 - DNA, 21 bp, synthetic construct
  misc_feature 1..21: note = Description of Artificial Sequence: Synthetic oligonucleotide
  source 1..21: mol_type = other DNA
  misc_feature 1..19: note = RNA
  misc_feature 20..21: note = DNA
cccattgggacagcttggatt

SEQ ID NO: 846 - DNA, 21 bp, synthetic construct
  misc_feature 1..21: note = Description of Artificial Sequence: Synthetic oligonucleotide
  source 1..21: mol_type = other DNA
  misc_feature 1..19: note = RNA
  misc_feature 20..21: note = DNA
ccaagctgtcccaatgggatt

SEQ ID NO: 847 - DNA, 21 bp, synthetic construct
  misc_feature 1..21: note = Description of Artificial Sequence: Synthetic oligonucleotide
  source 1..21: mol_type = other DNA
  misc_feature 1..19: note = RNA
  misc_feature 20..21: note = DNA
tcccattgggacagcttggtt

SEQ ID NO: 848 - DNA, 21 bp, synthetic construct
  misc_feature 1..21: note = Description of Artificial Sequence: Synthetic oligonucleotide
  source 1..21: mol_type = other DNA
  misc_feature 1..19: note = RNA
  misc_feature 20..21: note = DNA
caagctgtcccaatgggagtt

SEQ ID NO: 849 - DNA, 21 bp, synthetic construct
  misc_feature 1..21: note = Description of Artificial Sequence: Synthetic oligonucleotide
  source 1..21: mol_type = other DNA
  misc_feature 1..19: note = RNA
  misc_feature 20..21: note = DNA
ctcccattgggacagcttgtt

SEQ ID NO: 850 - DNA, 21 bp, synthetic construct
  misc_feature 1..21: note = Description of Artificial Sequence: Synthetic oligonucleotide
  source 1..21: mol_type = other DNA
  misc_feature 1..19: note = RNA
  misc_feature 20..21: note = DNA
agctgtcccaatgggagcttt

SEQ ID NO: 851 - DNA, 21 bp, synthetic construct
  misc_feature 1..21: note = Description of Artificial Sequence: Synthetic oligonucleotide
  source 1..21: mol_type = other DNA
  misc_feature 1..19: note = RNA
  misc_feature 20..21: note = DNA
agctcccattgggacagcttt

SEQ ID NO: 852 - DNA, 21 bp, synthetic construct
  misc_feature 1..21: note = Description of Artificial Sequence: Synthetic oligonucleotide
  source 1..21: mol_type = other DNA
  misc_feature 1..19: note = RNA
  misc_feature 20..21: note = DNA
tgtcccaatgggagctgcttt

SEQ ID NO: 853 - DNA, 21 bp, synthetic construct
  misc_feature 1..21: note = Description of Artificial Sequence: Synthetic oligonucleotide
  source 1..21: mol_type = other DNA
  misc_feature 1..19: note = RNA
  misc_feature 20..21: note = DNA
agcagctcccattgggacatt

SEQ ID NO: 854 - DNA, 21 bp, synthetic construct
  misc_feature 1..21: note = Description of Artificial Sequence: Synthetic oligonucleotide
  source 1..21: mol_type = other DNA
  misc_feature 1..19: note = RNA
  misc_feature 20..21: note = DNA
ggtgcaggagaggagaacttt

SEQ ID NO: 855 - DNA, 21 bp, synthetic construct
  misc_feature 1..21: note = Description of Artificial Sequence: Synthetic oligonucleotide
  source 1..21: mol_type = other DNA
  misc_feature 1..19: note = RNA
  misc_feature 20..21: note = DNA
agttctcctctcctgcacctt

SEQ ID NO: 856 - DNA, 21 bp, synthetic construct
  misc_feature 1..21: note = Description of Artificial Sequence: Synthetic oligonucleotide
  source 1..21: mol_type = other DNA
  misc_feature 1..19: note = RNA
  misc_feature 20..21: note = DNA
aaactgaccaaaatcatcttt

SEQ ID NO: 857 - DNA, 21 bp, synthetic construct
  misc_feature 1..21: note = Description of Artificial Sequence: Synthetic oligonucleotide
  source 1..21: mol_type = other DNA
  misc_feature 1..19: note = RNA
  misc_feature 20..21: note = DNA
agatgattttggtcagttttt

SEQ ID NO: 858 - DNA, 21 bp, synthetic construct
  misc_feature 1..21: note = Description of Artificial Sequence: Synthetic oligonucleotide
  source 1..21: mol_type = other DNA
  misc_feature 1..19: note = RNA
  misc_feature 20..21: note = DNA
aactgaccaaaatcatctgtt

SEQ ID NO: 859 - DNA, 21 bp, synthetic construct
  misc_feature 1..21: note = Description of Artificial Sequence: Synthetic oligonucleotide
  source 1..21: mol_type = other DNA
  misc_feature 1..19: note = RNA
  misc_feature 20..21: note = DNA
cagatgattttggtcagtttt

SEQ ID NO: 860 - DNA, 21 bp, synthetic construct
  misc_feature 1..21: note = Description of Artificial Sequence: Synthetic oligonucleotide
  source 1..21: mol_type = other DNA
  misc_feature 1..19: note = RNA
  misc_feature 20..21: note = DNA
actgaccaaaatcatctgttt

SEQ ID NO: 861 - DNA, 21 bp, synthetic construct
  misc_feature 1..21: note = Description of Artificial Sequence: Synthetic oligonucleotide
  source 1..21: mol_type = other DNA
  misc_feature 1..19: note = RNA
  misc_feature 20..21: note = DNA
acagatgattttggtcagttt

SEQ ID NO: 862 - DNA, 21 bp, synthetic construct
  misc_feature 1..21: note = Description of Artificial Sequence: Synthetic oligonucleotide
  source 1..21: mol_type = other DNA
  misc_feature 1..19: note = RNA
  misc_feature 20..21: note = DNA
accaaaatcatctgtgccctt

SEQ ID NO: 863 - DNA, 21 bp, synthetic construct
  misc_feature 1..21: note = Description of Artificial Sequence: Synthetic oligonucleotide
  source 1..21: mol_type = other DNA
  misc_feature 1..19: note = RNA
  misc_feature 20..21: note = DNA
gggcacagatgattttggttt

SEQ ID NO: 864 - DNA, 21 bp, synthetic construct
  misc_feature 1..21: note = Description of Artificial Sequence: Synthetic oligonucleotide
  source 1..21: mol_type = other DNA
  misc_feature 1..19: note = RNA
  misc_feature 20..21: note = DNA
ccaaaatcatctgtgcccatt

SEQ ID NO: 865 - DNA, 21 bp, synthetic construct
  misc_feature 1..21: note = Description of Artificial Sequence: Synthetic oligonucleotide
  source 1..21: mol_type = other DNA
  misc_feature 1..19: note = RNA
  misc_feature 20..21: note = DNA
tgggcacagatgattttggtt

SEQ ID NO: 866 - DNA, 21 bp, synthetic construct
  misc_feature 1..21: note = Description of Artificial Sequence: Synthetic oligonucleotide
  source 1..21: mol_type = other DNA
  misc_feature 1..19: note = RNA
  misc_feature 20..21: note = DNA
aaatcatctgtgcccagcatt

SEQ ID NO: 867 - DNA, 21 bp, synthetic construct
  misc_feature 1..21: note = Description of Artificial Sequence: Synthetic oligonucleotide
  source 1..21: mol_type = other DNA
  misc_feature 1..19: note = RNA
  misc_feature 20..21: note = DNA
tgctgggcacagatgattttt

SEQ ID NO: 868 - DNA, 21 bp, synthetic construct
  misc_feature 1..21: note = Description of Artificial Sequence: Synthetic oligonucleotide
  source 1..21: mol_type = other DNA
  misc_feature 1..19: note = RNA
  misc_feature 20..21: note = DNA
gtgcccagcagtgctccggtt

SEQ ID NO: 869 - DNA, 21 bp, synthetic construct
  misc_feature 1..21: note = Description of Artificial Sequence: Synthetic oligonucleotide
  source 1..21: mol_type = other DNA
  misc_feature 1..19: note = RNA
  misc_feature 20..21: note = DNA
ccggagcactgctgggcactt

SEQ ID NO: 870 - DNA, 21 bp, synthetic construct
  misc_feature 1..21: note = Description of Artificial Sequence: Synthetic oligonucleotide
  source 1..21: mol_type = other DNA
  misc_feature 1..19: note = RNA
  misc_feature 20..21: note = DNA
gcccagcagtgctccgggctt

SEQ ID NO: 871 - DNA, 21 bp, synthetic construct
  misc_feature 1..21: note = Description of Artificial Sequence: Synthetic oligonucleotide
  source 1..21: mol_type = other DNA
  misc_feature 1..19: note = RNA
  misc_feature 20..21: note = DNA
gcccggagcactgctgggctt

SEQ ID NO: 872 - DNA, 21 bp, synthetic construct
  misc_feature 1..21: note = Description of Artificial Sequence: Synthetic oligonucleotide
  source 1..21: mol_type = other DNA
  misc_feature 1..19: note = RNA
  misc_feature 20..21: note = DNA
ccagtgactgctgccacaatt

SEQ ID NO: 873 - DNA, 21 bp, synthetic construct
  misc_feature 1..21: note = Description of Artificial Sequence: Synthetic oligonucleotide
  source 1..21: mol_type = other DNA
  misc_feature 1..19: note = RNA
  misc_feature 20..21: note = DNA
ttgtggcagcagtcactggtt

SEQ ID NO: 874 - DNA, 21 bp, synthetic construct
  misc_feature 1..21: note = Description of Artificial Sequence: Synthetic oligonucleotide
  source 1..21: mol_type = other DNA
  misc_feature 1..19: note = RNA
  misc_feature 20..21: note = DNA
cagtgactgctgccacaactt

SEQ ID NO: 875 - DNA, 21 bp, synthetic construct
  misc_feature 1..21: note = Description of Artificial Sequence: Synthetic oligonucleotide
  source 1..21: mol_type = other DNA
  misc_feature 1..19: note = RNA
  misc_feature 20..21: note = DNA
gttgtggcagcagtcactgtt

SEQ ID NO: 876 - DNA, 21 bp, synthetic construct
  misc_feature 1..21: note = Description of Artificial Sequence: Synthetic oligonucleotide
  source 1..21: mol_type = other DNA
  misc_feature 1..19: note = RNA
  misc_feature 20..21: note = DNA
gagagcgactgcctggtcttt

SEQ ID NO: 877 - DNA, 21 bp, synthetic construct
  misc_feature 1..21: note = Description of Artificial Sequence: Synthetic oligonucleotide
  source 1..21: mol_type = other DNA
  misc_feature 1..19: note = RNA
  misc_feature 20..21: note = DNA
agaccaggcagtcgctctctt

SEQ ID NO: 878 - DNA, 21 bp, synthetic construct
  misc_feature 1..21: note = Description of Artificial Sequence: Synthetic oligonucleotide
  source 1..21: mol_type = other DNA
  misc_feature 1..19: note = RNA
  misc_feature 20..21: note = DNA
agagcgactgcctggtctgtt

SEQ ID NO: 879 - DNA, 21 bp, synthetic construct
  misc_feature 1..21: note = Description of Artificial Sequence: Synthetic oligonucleotide
  source 1..21: mol_type = other DNA
  misc_feature 1..19: note = RNA
  misc_feature 20..21: note = DNA
cagaccaggcagtcgctcttt

SEQ ID NO: 880 - DNA, 21 bp, synthetic construct
  misc_feature 1..21: note = Description of Artificial Sequence: Synthetic oligonucleotide
  source 1..21: mol_type = other DNA
  misc_feature 1..19: note = RNA
  misc_feature 20..21: note = DNA
gagcgactgcctggtctgctt

SEQ ID NO: 881 - DNA, 21 bp, synthetic construct
  misc_feature 1..21: note = Description of Artificial Sequence: Synthetic oligonucleotide
  source 1..21: mol_type = other DNA
  misc_feature 1..19: note = RNA
  misc_feature 20..21: note = DNA
gcagaccaggcagtcgctctt

SEQ ID NO: 882 - DNA, 21 bp, synthetic construct
  misc_feature 1..21: note = Description of Artificial Sequence: Synthetic oligonucleotide
  source 1..21: mol_type = other DNA
  misc_feature 1..19: note = RNA
  misc_feature 20..21: note = DNA
agcgactgcctggtctgcctt

SEQ ID NO: 883 - DNA, 21 bp, synthetic construct
  misc_feature 1..21: note = Description of Artificial Sequence: Synthetic oligonucleotide
  source 1..21: mol_type = other DNA
  misc_feature 1..19: note = RNA
  misc_feature 20..21: note = DNA
ggcagaccaggcagtcgcttt

SEQ ID NO: 884 - DNA, 21 bp, synthetic construct
  misc_feature 1..21: note = Description of Artificial Sequence: Synthetic oligonucleotide
  source 1..21: mol_type = other DNA
  misc_feature 1..19: note = RNA
  misc_feature 20..21: note = DNA
gcgactgcctggtctgccgtt

SEQ ID NO: 885 - DNA, 21 bp, synthetic construct
  misc_feature 1..21: note = Description of Artificial Sequence: Synthetic oligonucleotide
  source 1..21: mol_type = other DNA
  misc_feature 1..19: note = RNA
  misc_feature 20..21: note = DNA
cggcagaccaggcagtcgctt

SEQ ID NO: 886 - DNA, 21 bp, synthetic construct
  misc_feature 1..21: note = Description of Artificial Sequence: Synthetic oligonucleotide
  source 1..21: mol_type = other DNA
  misc_feature 1..19: note = RNA
  misc_feature 20..21: note = DNA
cgactgcctggtctgccgctt

SEQ ID NO: 887 - DNA, 21 bp, synthetic construct
  misc_feature 1..21: note = Description of Artificial Sequence: Synthetic oligonucleotide
  source 1..21: mol_type = other DNA
  misc_feature 1..19: note = RNA
  misc_feature 20..21: note = DNA
gcggcagaccaggcagtcgtt

SEQ ID NO: 888 - DNA, 21 bp, synthetic construct
  misc_feature 1..21: note = Description of Artificial Sequence: Synthetic oligonucleotide
  source 1..21: mol_type = other DNA
  misc_feature 1..19: note = RNA
  misc_feature 20..21: note = DNA
gcctggtctgccgcaaatttt

SEQ ID NO: 889 - DNA, 21 bp, synthetic construct
  misc_feature 1..21: note = Description of Artificial Sequence: Synthetic oligonucleotide
  source 1..21: mol_type = other DNA
  misc_feature 1..19: note = RNA
  misc_feature 20..21: note = DNA
aatttgcggcagaccaggctt

SEQ ID NO: 890 - DNA, 21 bp, synthetic construct
  misc_feature 1..21: note = Description of Artificial Sequence: Synthetic oligonucleotide
  source 1..21: mol_type = other DNA
  misc_feature 1..19: note = RNA
  misc_feature 20..21: note = DNA
cctggtctgccgcaaattctt

SEQ ID NO: 891 - DNA, 21 bp, synthetic construct
  misc_feature 1..21: note = Description of Artificial Sequence: Synthetic oligonucleotide
  source 1..21: mol_type = other DNA
  misc_feature 1..19: note = RNA
  misc_feature 20..21: note = DNA
gaatttgcggcagaccaggtt

SEQ ID NO: 892 - DNA, 21 bp, synthetic construct
  misc_feature 1..21: note = Description of Artificial Sequence: Synthetic oligonucleotide
  source 1..21: mol_type = other DNA
  misc_feature 1..19: note = RNA
  misc_feature 20..21: note = DNA
ctggtctgccgcaaattcctt

SEQ ID NO: 893 - DNA, 21 bp, synthetic construct
  misc_feature 1..21: note = Description of Artificial Sequence: Synthetic oligonucleotide
  source 1..21: mol_type = other DNA
  misc_feature 1..19: note = RNA
  misc_feature 20..21: note = DNA
ggaatttgcggcagaccagtt

SEQ ID NO: 894 - DNA, 21 bp, synthetic construct
  misc_feature 1..21: note = Description of Artificial Sequence: Synthetic oligonucleotide
  source 1..21: mol_type = other DNA
  misc_feature 1..19: note = RNA
  misc_feature 20..21: note = DNA
tggtctgccgcaaattccgtt

SEQ ID NO: 895 - DNA, 21 bp, synthetic construct
  misc_feature 1..21: note = Description of Artificial Sequence: Synthetic oligonucleotide
  source 1..21: mol_type = other DNA
  misc_feature 1..19: note = RNA
  misc_feature 20..21: note = DNA
cggaatttgcggcagaccatt

SEQ ID NO: 896 - DNA, 21 bp, synthetic construct
  misc_feature 1..21: note = Description of Artificial Sequence: Synthetic oligonucleotide
  source 1..21: mol_type = other DNA
  misc_feature 1..19: note = RNA
  misc_feature 20..21: note = DNA
gtctgccgcaaattccgagtt

SEQ ID NO: 897 - DNA, 21 bp, synthetic construct
  misc_feature 1..21: note = Description of Artificial Sequence: Synthetic oligonucleotide
  source 1..21: mol_type = other DNA
  misc_feature 1..19: note = RNA
  misc_feature 20..21: note = DNA
ctcggaatttgcggcagactt

SEQ ID NO: 898 - DNA, 21 bp, synthetic construct
  misc_feature 1..21: note = Description of Artificial Sequence: Synthetic oligonucleotide
  source 1..21: mol_type = other DNA
  misc_feature 1..19: note = RNA
  misc_feature 20..21: note = DNA
tctgccgcaaattccgagatt

SEQ ID NO: 899 - DNA, 21 bp, synthetic construct
  misc_feature 1..21: note = Description of Artificial Sequence: Synthetic oligonucleotide
  source 1..21: mol_type = other DNA
  misc_feature 1..19: note = RNA
  misc_feature 20..21: note = DNA
tctcggaatttgcggcagatt

SEQ ID NO: 900 - DNA, 21 bp, synthetic construct
  misc_feature 1..21: note = Description of Artificial Sequence: Synthetic oligonucleotide
  source 1..21: mol_type = other DNA
  misc_feature 1..19: note = RNA
  misc_feature 20..21: note = DNA
ctgccgcaaattccgagactt

SEQ ID NO: 901 - DNA, 21 bp, synthetic construct
  misc_feature 1..21: note = Description of Artificial Sequence: Synthetic oligonucleotide
  source 1..21: mol_type = other DNA
  misc_feature 1..19: note = RNA
  misc_feature 20..21: note = DNA
gtctcggaatttgcggcagtt

SEQ ID NO: 902 - DNA, 21 bp, synthetic construct
  misc_feature 1..21: note = Description of Artificial Sequence: Synthetic oligonucleotide
  source 1..21: mol_type = other DNA
  misc_feature 1..19: note = RNA
  misc_feature 20..21: note = DNA
tgccgcaaattccgagacgtt

SEQ ID NO: 903 - DNA, 21 bp, synthetic construct
  misc_feature 1..21: note = Description of Artificial Sequence: Synthetic oligonucleotide
  source 1..21: mol_type = other DNA
  misc_feature 1..19: note = RNA
  misc_feature 20..21: note = DNA
cgtctcggaatttgcggcatt

SEQ ID NO: 904 - DNA, 21 bp, synthetic construct
  misc_feature 1..21: note = Description of Artificial Sequence: Synthetic oligonucleotide
  source 1..21: mol_type = other DNA
  misc_feature 1..19: note = RNA
  misc_feature 20..21: note = DNA
ccgcaaattccgagacgaatt

SEQ ID NO: 905 - DNA, 21 bp, synthetic construct
  misc_feature 1..21: note = Description of Artificial Sequence: Synthetic oligonucleotide
  source 1..21: mol_type = other DNA
  misc_feature 1..19: note = RNA
  misc_feature 20..21: note = DNA
ttcgtctcggaatttgcggtt

SEQ ID NO: 906 - DNA, 21 bp, synthetic construct
  misc_feature 1..21: note = Description of Artificial Sequence: Synthetic oligonucleotide
  source 1..21: mol_type = other DNA
  misc_feature 1..19: note = RNA
  misc_feature 20..21: note = DNA
aattccgagacgaagccactt

SEQ ID NO: 907 - DNA, 21 bp, synthetic construct
  misc_feature 1..21: note = Description of Artificial Sequence: Synthetic oligonucleotide
  source 1..21: mol_type = other DNA
  misc_feature 1..19: note = RNA
  misc_feature 20..21: note = DNA
gtggcttcgtctcggaatttt

SEQ ID NO: 908 - DNA, 21 bp, synthetic construct
  misc_feature 1..21: note = Description of Artificial Sequence: Synthetic oligonucleotide
  source 1..21: mol_type = other DNA
  misc_feature 1..19: note = RNA
  misc_feature 20..21: note = DNA
attccgagacgaagccacgtt

SEQ ID NO: 909 - DNA, 21 bp, synthetic construct
  misc_feature 1..21: note = Description of Artificial Sequence: Synthetic oligonucleotide
  source 1..21: mol_type = other DNA
  misc_feature 1..19: note = RNA
  misc_feature 20..21: note = DNA
cgtggcttcgtctcggaattt

SEQ ID NO: 910 - DNA, 21 bp, synthetic construct
  misc_feature 1..21: note = Description of Artificial Sequence: Synthetic oligonucleotide
  source 1..21: mol_type = other DNA
  misc_feature 1..19: note = RNA
  misc_feature 20..21: note = DNA
ttccgagacgaagccacgttt

SEQ ID NO: 911 - DNA, 21 bp, synthetic construct
  misc_feature 1..21: note = Description of Artificial Sequence: Synthetic oligonucleotide
  source 1..21: mol_type = other DNA
  misc_feature 1..19: note = RNA
  misc_feature 20..21: note = DNA
acgtggcttcgtctcggaatt

SEQ ID NO: 912 - DNA, 21 bp, synthetic construct
  misc_feature 1..21: note = Description of Artificial Sequence: Synthetic oligonucleotide
  source 1..21: mol_type = other DNA
  misc_feature 1..19: note = RNA
  misc_feature 20..21: note = DNA
tccgagacgaagccacgtgtt

SEQ ID NO: 913 - DNA, 21 bp, synthetic construct
  misc_feature 1..21: note = Description of Artificial Sequence: Synthetic oligonucleotide
  source 1..21: mol_type = other DNA
  misc_feature 1..19: note = RNA
  misc_feature 20..21: note = DNA
cacgtggcttcgtctcggatt

SEQ ID NO: 914 - DNA, 21 bp, synthetic construct
  misc_feature 1..21: note = Description of Artificial Sequence: Synthetic oligonucleotide
  source 1..21: mol_type = other DNA
  misc_feature 1..19: note = RNA
  misc_feature 20..21: note = DNA
ccgagacgaagccacgtgctt

SEQ ID NO: 915 - DNA, 21 bp, synthetic construct
  misc_feature 1..21: note = Description of Artificial Sequence: Synthetic oligonucleotide
  source 1..21: mol_type = other DNA
  misc_feature 1..19: note = RNA
  misc_feature 20..21: note = DNA
gcacgtggcttcgtctcggtt

SEQ ID NO: 916 - DNA, 21 bp, synthetic construct
  misc_feature 1..21: note = Description of Artificial Sequence: Synthetic oligonucleotide
  source 1..21: mol_type = other DNA
  misc_feature 1..19: note = RNA
  misc_feature 20..21: note = DNA
gagacgaagccacgtgcaatt

SEQ ID NO: 917 - DNA, 21 bp, synthetic construct
  misc_feature 1..21: note = Description of Artificial Sequence: Synthetic oligonucleotide
  source 1..21: mol_type = other DNA
  misc_feature 1..19: note = RNA
  misc_feature 20..21: note = DNA
ttgcacgtggcttcgtctctt

SEQ ID NO: 918 - DNA, 21 bp, synthetic construct
  misc_feature 1..21: note = Description of Artificial Sequence: Synthetic oligonucleotide
  source 1..21: mol_type = other DNA
  misc_feature 1..19: note = RNA
  misc_feature 20..21: note = DNA
acgaagccacgtgcaaggatt

SEQ ID NO: 919 - DNA, 21 bp, synthetic construct
  misc_feature 1..21: note = Description of Artificial Sequence: Synthetic oligonucleotide
  source 1..21: mol_type = other DNA
  misc_feature 1..19: note = RNA
  misc_feature 20..21: note = DNA
tccttgcacgtggcttcgttt

SEQ ID NO: 920 - DNA, 21 bp, synthetic construct
  misc_feature 1..21: note = Description of Artificial Sequence: Synthetic oligonucleotide
  source 1..21: mol_type = other DNA
  misc_feature 1..19: note = RNA
  misc_feature 20..21: note = DNA
cgaagccacgtgcaaggactt

SEQ ID NO: 921 - DNA, 21 bp, synthetic construct
  misc_feature 1..21: note = Description of Artificial Sequence: Synthetic oligonucleotide
  source 1..21: mol_type = other DNA
  misc_feature 1..19: note = RNA
  misc_feature 20..21: note = DNA
gtccttgcacgtggcttcgtt

SEQ ID NO: 922 - DNA, 21 bp, synthetic construct
  misc_feature 1..21: note = Description of Artificial Sequence: Synthetic oligonucleotide
  source 1..21: mol_type = other DNA
  misc_feature 1..19: note = RNA
  misc_feature 20..21: note = DNA
gaagccacgtgcaaggacatt

SEQ ID NO: 923 - DNA, 21 bp, synthetic construct
  misc_feature 1..21: note = Description of Artificial Sequence: Synthetic oligonucleotide
  source 1..21: mol_type = other DNA
  misc_feature 1..19: note = RNA
  misc_feature 20..21: note = DNA
tgtccttgcacgtggcttctt

SEQ ID NO: 924 - DNA, 21 bp, synthetic construct
  misc_feature 1..21: note = Description of Artificial Sequence: Synthetic oligonucleotide
  source 1..21: mol_type = other DNA
  misc_feature 1..19: note = RNA
  misc_feature 20..21: note = DNA
aagccacgtgcaaggacactt

SEQ ID NO: 925 - DNA, 21 bp, synthetic construct
  misc_feature 1..21: note = Description of Artificial Sequence: Synthetic oligonucleotide
  source 1..21: mol_type = other DNA
  misc_feature 1..19: note = RNA
  misc_feature 20..21: note = DNA
gtgtccttgcacgtggctttt

SEQ ID NO: 926 - DNA, 21 bp, synthetic construct
  misc_feature 1..21: note = Description of Artificial Sequence: Synthetic oligonucleotide
  source 1..21: mol_type = other DNA
  misc_feature 1..19: note = RNA
  misc_feature 20..21: note = DNA
ccccactcatgctctacaatt

SEQ ID NO: 927 - DNA, 21 bp, synthetic construct
  misc_feature 1..21: note = Description of Artificial Sequence: Synthetic oligonucleotide
  source 1..21: mol_type = other DNA
  misc_feature 1..19: note = RNA
  misc_feature 20..21: note = DNA
ttgtagagcatgagtggggtt

SEQ ID NO: 928 - DNA, 21 bp, synthetic construct
  misc_feature 1..21: note = Description of Artificial Sequence: Synthetic oligonucleotide
  source 1..21: mol_type = other DNA
  misc_feature 1..19: note = RNA
  misc_feature 20..21: note = DNA
ccactcatgctctacaacctt

SEQ ID NO: 929 - DNA, 21 bp, synthetic construct
  misc_feature 1..21: note = Description of Artificial Sequence: Synthetic oligonucleotide
  source 1..21: mol_type = other DNA
  misc_feature 1..19: note = RNA
  misc_feature 20..21: note = DNA
ggttgtagagcatgagtggtt

SEQ ID NO: 930 - DNA, 21 bp, synthetic construct
  misc_feature 1..21: note = Description of Artificial Sequence: Synthetic oligonucleotide
  source 1..21: mol_type = other DNA
  misc_feature 1..19: note = RNA
  misc_feature 20..21: note = DNA
actcatgctctacaacccctt

SEQ ID NO: 931 - DNA, 21 bp, synthetic construct
  misc_feature 1..21: note = Description of Artificial Sequence: Synthetic oligonucleotide
  source 1..21: mol_type = other DNA
  misc_feature 1..19: note = RNA
  misc_feature 20..21: note = DNA
ggggttgtagagcatgagttt

SEQ ID NO: 932 - DNA, 21 bp, synthetic construct
  misc_feature 1..21: note = Description of Artificial Sequence: Synthetic oligonucleotide
  source 1..21: mol_type = other DNA
  misc_feature 1..19: note = RNA
  misc_feature 20..21: note = DNA
catgctctacaaccccacctt

SEQ ID NO: 933 - DNA, 21 bp, synthetic construct
  misc_feature 1..21: note = Description of Artificial Sequence: Synthetic oligonucleotide
  source 1..21: mol_type = other DNA
  misc_feature 1..19: note = RNA
  misc_feature 20..21: note = DNA
ggtggggttgtagagcatgtt

SEQ ID NO: 934 - DNA, 21 bp, synthetic construct
  misc_feature 1..21: note = Description of Artificial Sequence: Synthetic oligonucleotide
  source 1..21: mol_type = other DNA
  misc_feature 1..19: note = RNA
  misc_feature 20..21: note = DNA
ccagatggatgtgaacccctt

SEQ ID NO: 935 - DNA, 21 bp, synthetic construct
  misc_feature 1..21: note = Description of Artificial Sequence: Synthetic oligonucleotide
  source 1..21: mol_type = other DNA
  misc_feature 1..19: note = RNA
  misc_feature 20..21: note = DNA
ggggttcacatccatctggtt

SEQ ID NO: 936 - DNA, 21 bp, synthetic construct
  misc_feature 1..21: note = Description of Artificial Sequence: Synthetic oligonucleotide
  source 1..21: mol_type = other DNA
  misc_feature 1..19: note = RNA
  misc_feature 20..21: note = DNA
agatggatgtgaaccccgatt

SEQ ID NO: 937 - DNA, 21 bp, synthetic construct
  misc_feature 1..21: note = Description of Artificial Sequence: Synthetic oligonucleotide
  source 1..21: mol_type = other DNA
  misc_feature 1..19: note = RNA
  misc_feature 20..21: note = DNA
tcggggttcacatccatcttt

SEQ ID NO: 938 - DNA, 21 bp, synthetic construct
  misc_feature 1..21: note = Description of Artificial Sequence: Synthetic oligonucleotide
  source 1..21: mol_type = other DNA
  misc_feature 1..19: note = RNA
  misc_feature 20..21: note = DNA
gatggatgtgaaccccgagtt

SEQ ID NO: 939 - DNA, 21 bp, synthetic construct
  misc_feature 1..21: note = Description of Artificial Sequence: Synthetic oligonucleotide
  source 1..21: mol_type = other DNA
  misc_feature 1..19: note = RNA
  misc_feature 20..21: note = DNA
ctcggggttcacatccatctt

SEQ ID NO: 940 - DNA, 21 bp, synthetic construct
  misc_feature 1..21: note = Description of Artificial Sequence: Synthetic oligonucleotide
  source 1..21: mol_type = other DNA
  misc_feature 1..19: note = RNA
  misc_feature 20..21: note = DNA
atggatgtgaaccccgaggtt

SEQ ID NO: 941 - DNA, 21 bp, synthetic construct
  misc_feature 1..21: note = Description of Artificial Sequence: Synthetic oligonucleotide
  source 1..21: mol_type = other DNA
  misc_feature 1..19: note = RNA
  misc_feature 20..21: note = DNA
cctcggggttcacatccattt

SEQ ID NO: 942 - DNA, 21 bp, synthetic construct
  misc_feature 1..21: note = Description of Artificial Sequence: Synthetic oligonucleotide
  source 1..21: mol_type = other DNA
  misc_feature 1..19: note = RNA
  misc_feature 20..21: note = DNA
ggatgtgaaccccgagggctt

SEQ ID NO: 943 - DNA, 21 bp, synthetic construct
  misc_feature 1..21: note = Description of Artificial Sequence: Synthetic oligonucleotide
  source 1..21: mol_type = other DNA
  misc_feature 1..19: note = RNA
  misc_feature 20..21: note = DNA
gccctcggggttcacatcctt

SEQ ID NO: 944 - DNA, 21 bp, synthetic construct
  misc_feature 1..21: note = Description of Artificial Sequence: Synthetic oligonucleotide
  source 1..21: mol_type = other DNA
  misc_feature 1..19: note = RNA
  misc_feature 20..21: note = DNA
gatgtgaaccccgagggcatt

SEQ ID NO: 945 - DNA, 21 bp, synthetic construct
  misc_feature 1..21: note = Description of Artificial Sequence: Synthetic oligonucleotide
  source 1..21: mol_type = other DNA
  misc_feature 1..19: note = RNA
  misc_feature 20..21: note = DNA
tgccctcggggttcacatctt

SEQ ID NO: 946 - DNA, 21 bp, synthetic construct
  misc_feature 1..21: note = Description of Artificial Sequence: Synthetic oligonucleotide
  source 1..21: mol_type = other DNA
  misc_feature 1..19: note = RNA
  misc_feature 20..21: note = DNA
tgtgaaccccgagggcaaatt

SEQ ID NO: 947 - DNA, 21 bp, synthetic construct
  misc_feature 1..21: note = Description of Artificial Sequence: Synthetic oligonucleotide
  source 1..21: mol_type = other DNA
  misc_feature 1..19: note = RNA
  misc_feature 20..21: note = DNA
tttgccctcggggttcacatt

SEQ ID NO: 948 - DNA, 21 bp, synthetic construct
  misc_feature 1..21: note = Description of Artificial Sequence: Synthetic oligonucleotide
  source 1..21: mol_type = other DNA
  misc_feature 1..19: note = RNA
  misc_feature 20..21: note = DNA
aaccccgagggcaaatacatt

SEQ ID NO: 949 - DNA, 21 bp, synthetic construct
  misc_feature 1..21: note = Description of Artificial Sequence: Synthetic oligonucleotide
  source 1..21: mol_type = other DNA
  misc_feature 1..19: note = RNA
  misc_feature 20..21: note = DNA
tgtatttgccctcggggtttt

SEQ ID NO: 950 - DNA, 21 bp, synthetic construct
  misc_feature 1..21: note = Description of Artificial Sequence: Synthetic oligonucleotide
  source 1..21: mol_type = other DNA
  misc_feature 1..19: note = RNA
  misc_feature 20..21: note = DNA
accccgagggcaaatacagtt

SEQ ID NO: 951 - DNA, 21 bp, synthetic construct
  misc_feature 1..21: note = Description of Artificial Sequence: Synthetic oligonucleotide
  source 1..21: mol_type = other DNA
  misc_feature 1..19: note = RNA
  misc_feature 20..21: note = DNA
ctgtatttgccctcggggttt

SEQ ID NO: 952 - DNA, 21 bp, synthetic construct
  misc_feature 1..21: note = Description of Artificial Sequence: Synthetic oligonucleotide
  source 1..21: mol_type = other DNA
  misc_feature 1..19: note = RNA
  misc_feature 20..21: note = DNA
cccgagggcaaatacagcttt

SEQ ID NO: 953 - DNA, 21 bp, synthetic construct
  misc_feature 1..21: note = Description of Artificial Sequence: Synthetic oligonucleotide
  source 1..21: mol_type = other DNA
  misc_feature 1..19: note = RNA
  misc_feature 20..21: note = DNA
agctgtatttgccctcgggtt

SEQ ID NO: 954 - DNA, 21 bp, synthetic construct
  misc_feature 1..21: note = Description of Artificial Sequence: Synthetic oligonucleotide
  source 1..21: mol_type = other DNA
  misc_feature 1..19: note = RNA
  misc_feature 20..21: note = DNA
ccgagggcaaatacagctttt

SEQ ID NO: 955 - DNA, 21 bp, synthetic construct
  misc_feature 1..21: note = Description of Artificial Sequence: Synthetic oligonucleotide
  source 1..21: mol_type = other DNA
  misc_feature 1..19: note = RNA
  misc_feature 20..21: note = DNA
aagctgtatttgccctcggtt

SEQ ID NO: 956 - DNA, 21 bp, synthetic construct
  misc_feature 1..21: note = Description of Artificial Sequence: Synthetic oligonucleotide
  source 1..21: mol_type = other DNA
  misc_feature 1..19: note = RNA
  misc_feature 20..21: note = DNA
cgagggcaaatacagcttttt

SEQ ID NO: 957 - DNA, 21 bp, synthetic construct
  misc_feature 1..21: note = Description of Artificial Sequence: Synthetic oligonucleotide
  source 1..21: mol_type = other DNA
  misc_feature 1..19: note = RNA
  misc_feature 20..21: note = DNA
aaagctgtatttgccctcgtt

SEQ ID NO: 958 - DNA, 21 bp, synthetic construct
  misc_feature 1..21: note = Description of Artificial Sequence: Synthetic oligonucleotide
  source 1..21: mol_type = other DNA
  misc_feature 1..19: note = RNA
  misc_feature 20..21: note = DNA
aaatacagctttggtgccatt

SEQ ID NO: 959 - DNA, 21 bp, synthetic construct
  misc_feature 1..21: note = Description of Artificial Sequence: Synthetic oligonucleotide
  source 1..21: mol_type = other DNA
  misc_feature 1..19: note = RNA
  misc_feature 20..21: note = DNA
tggcaccaaagctgtattttt

SEQ ID NO: 960 - DNA, 21 bp, synthetic construct
  misc_feature 1..21: note = Description of Artificial Sequence: Synthetic oligonucleotide
  source 1..21: mol_type = other DNA
  misc_feature 1..19: note = RNA
  misc_feature 20..21: note = DNA
aatacagctttggtgccactt

SEQ ID NO: 961 - DNA, 21 bp, synthetic construct
  misc_feature 1..21: note = Description of Artificial Sequence: Synthetic oligonucleotide
  source 1..21: mol_type = other DNA
  misc_feature 1..19: note = RNA
  misc_feature 20..21: note = DNA
gtggcaccaaagctgtatttt

SEQ ID NO: 962 - DNA, 21 bp, synthetic construct
  misc_feature 1..21: note = Description of Artificial Sequence: Synthetic oligonucleotide
  source 1..21: mol_type = other DNA
  misc_feature 1..19: note = RNA
  misc_feature 20..21: note = DNA
atacagctttggtgccacctt

SEQ ID NO: 963 - DNA, 21 bp, synthetic construct
  misc_feature 1..21: note = Description of Artificial Sequence: Synthetic oligonucleotide
  source 1..21: mol_type = other DNA
  misc_feature 1..19: note = RNA
  misc_feature 20..21: note = DNA
ggtggcaccaaagctgtattt

SEQ ID NO: 964 - DNA, 21 bp, synthetic construct
  misc_feature 1..21: note = Description of Artificial Sequence: Synthetic oligonucleotide
  source 1..21: mol_type = other DNA
  misc_feature 1..19: note = RNA
  misc_feature 20..21: note = DNA
ctttggtgccacctgcgtgtt

SEQ ID NO: 965 - DNA, 21 bp, synthetic construct
  misc_feature 1..21: note = Description of Artificial Sequence: Synthetic oligonucleotide
  source 1..21: mol_type = other DNA
  misc_feature 1..19: note = RNA
  misc_feature 20..21: note = DNA
cacgcaggtggcaccaaagtt

SEQ ID NO: 966 - DNA, 21 bp, synthetic construct
  misc_feature 1..21: note = Description of Artificial Sequence: Synthetic oligonucleotide
  source 1..21: mol_type = other DNA
  misc_feature 1..19: note = RNA
  misc_feature 20..21: note = DNA
ttggtgccacctgcgtgaatt

SEQ ID NO: 967 - DNA, 21 bp, synthetic construct
  misc_feature 1..21: note = Description of Artificial Sequence: Synthetic oligonucleotide
  source 1..21: mol_type = other DNA
  misc_feature 1..19: note = RNA
  misc_feature 20..21: note = DNA
ttcacgcaggtggcaccaatt

SEQ ID NO: 968 - DNA, 21 bp, synthetic construct
  misc_feature 1..21: note = Description of Artificial Sequence: Synthetic oligonucleotide
  source 1..21: mol_type = other DNA
  misc_feature 1..19: note = RNA
  misc_feature 20..21: note = DNA
ccacctgcgtgaagaagtgtt

SEQ ID NO: 969 - DNA, 21 bp, synthetic construct
  misc_feature 1..21: note = Description of Artificial Sequence: Synthetic oligonucleotide
  source 1..21: mol_type = other DNA
  misc_feature 1..19: note = RNA
  misc_feature 20..21: note = DNA
cacttcttcacgcaggtggtt

SEQ ID NO: 970 - DNA, 21 bp, synthetic construct
  misc_feature 1..21: note = Description of Artificial Sequence: Synthetic oligonucleotide
  source 1..21: mol_type = other DNA
  misc_feature 1..19: note = RNA
  misc_feature 20..21: note = DNA
ctgcgtgaagaagtgtccctt

SEQ ID NO: 971 - DNA, 21 bp, synthetic construct
  misc_feature 1..21: note = Description of Artificial Sequence: Synthetic oligonucleotide
  source 1..21: mol_type = other DNA
  misc_feature 1..19: note = RNA
  misc_feature 20..21: note = DNA
gggacacttcttcacgcagtt

SEQ ID NO: 972 - DNA, 21 bp, synthetic construct
  misc_feature 1..21: note = Description of Artificial Sequence: Synthetic oligonucleotide
  source 1..21: mol_type = other DNA
  misc_feature 1..19: note = RNA
  misc_feature 20..21: note = DNA
tgcgtgaagaagtgtcccctt

SEQ ID NO: 973 - DNA, 21 bp, synthetic construct
  misc_feature 1..21: note = Description of Artificial Sequence: Synthetic oligonucleotide
  source 1..21: mol_type = other DNA
  misc_feature 1..19: note = RNA
  misc_feature 20..21: note = DNA
ggggacacttcttcacgcatt

SEQ ID NO: 974 - DNA, 21 bp, synthetic construct
  misc_feature 1..21: note = Description of Artificial Sequence: Synthetic oligonucleotide
  source 1..21: mol_type = other DNA
  misc_feature 1..19: note = RNA
  misc_feature 20..21: note = DNA
gcgtgaagaagtgtccccgtt

SEQ ID NO: 975 - DNA, 21 bp, synthetic construct
  misc_feature 1..21: note = Description of Artificial Sequence: Synthetic oligonucleotide
  source 1..21: mol_type = other DNA
  misc_feature 1..19: note = RNA
  misc_feature 20..21: note = DNA
cggggacacttcttcacgctt

SEQ ID NO: 976 - DNA, 21 bp, synthetic construct
  misc_feature 1..21: note = Description of Artificial Sequence: Synthetic oligonucleotide
  source 1..21: mol_type = other DNA
  misc_feature 1..19: note = RNA
  misc_feature 20..21: note = DNA
cgtgaagaagtgtccccgttt

SEQ ID NO: 977 - DNA, 21 bp, synthetic construct
  misc_feature 1..21: note = Description of Artificial Sequence: Synthetic oligonucleotide
  source 1..21: mol_type = other DNA
  misc_feature 1..19: note = RNA
  misc_feature 20..21: note = DNA
acggggacacttcttcacgtt

SEQ ID NO: 978 - DNA, 21 bp, synthetic construct
  misc_feature 1..21: note = Description of Artificial Sequence: Synthetic oligonucleotide
  source 1..21: mol_type = other DNA
  misc_feature 1..19: note = RNA
  misc_feature 20..21: note = DNA
gtgaagaagtgtccccgtatt

SEQ ID NO: 979 - DNA, 21 bp, synthetic construct
  misc_feature 1..21: note = Description of Artificial Sequence: Synthetic oligonucleotide
  source 1..21: mol_type = other DNA
  misc_feature 1..19: note = RNA
  misc_feature 20..21: note = DNA
tacggggacacttcttcactt

SEQ ID NO: 980 - DNA, 21 bp, synthetic construct
  misc_feature 1..21: note = Description of Artificial Sequence: Synthetic oligonucleotide
  source 1..21: mol_type = other DNA
  misc_feature 1..19: note = RNA
  misc_feature 20..21: note = DNA
tgaagaagtgtccccgtaatt

SEQ ID NO: 981 - DNA, 21 bp, synthetic construct
  misc_feature 1..21: note = Description of Artificial Sequence: Synthetic oligonucleotide
  source 1..21: mol_type = other DNA
  misc_feature 1..19: note = RNA
  misc_feature 20..21: note = DNA
ttacggggacacttcttcatt

SEQ ID NO: 982 - DNA, 21 bp, synthetic construct
  misc_feature 1..21: note = Description of Artificial Sequence: Synthetic oligonucleotide
  source 1..21: mol_type = other DNA
  misc_feature 1..19: note = RNA
  misc_feature 20..21: note = DNA
gaagaagtgtccccgtaattt

SEQ ID NO: 983 - DNA, 21 bp, synthetic construct
  misc_feature 1..21: note = Description of Artificial Sequence: Synthetic oligonucleotide
  source 1..21: mol_type = other DNA
  misc_feature 1..19: note = RNA
  misc_feature 20..21: note = DNA
attacggggacacttcttctt

SEQ ID NO: 984 - DNA, 21 bp, synthetic construct
  misc_feature 1..21: note = Description of Artificial Sequence: Synthetic oligonucleotide
  source 1..21: mol_type = other DNA
  misc_feature 1..19: note = RNA
  misc_feature 20..21: note = DNA
aagaagtgtccccgtaatttt

SEQ ID NO: 985 - DNA, 21 bp, synthetic construct
  misc_feature 1..21: note = Description of Artificial Sequence: Synthetic oligonucleotide
  source 1..21: mol_type = other DNA
  misc_feature 1..19: note = RNA
  misc_feature 20..21: note = DNA
aattacggggacacttctttt

SEQ ID NO: 986 - DNA, 21 bp, synthetic construct
  misc_feature 1..21: note = Description of Artificial Sequence: Synthetic oligonucleotide
  source 1..21: mol_type = other DNA
  misc_feature 1..19: note = RNA
  misc_feature 20..21: note = DNA
agaagtgtccccgtaattatt

SEQ ID NO: 987 - DNA, 21 bp, synthetic construct
  misc_feature 1..21: note = Description of Artificial Sequence: Synthetic oligonucleotide
  source 1..21: mol_type = other DNA
  misc_feature 1..19: note = RNA
  misc_feature 20..21: note = DNA
taattacggggacacttcttt

SEQ ID NO: 988 - DNA, 21 bp, synthetic construct
  misc_feature 1..21: note = Description of Artificial Sequence: Synthetic oligonucleotide
  source 1..21: mol_type = other DNA
  misc_feature 1..19: note = RNA
  misc_feature 20..21: note = DNA
gaagtgtccccgtaattattt

SEQ ID NO: 989 - DNA, 21 bp, synthetic construct
  misc_feature 1..21: note = Description of Artificial Sequence: Synthetic oligonucleotide
  source 1..21: mol_type = other DNA
  misc_feature 1..19: note = RNA
  misc_feature 20..21: note = DNA
ataattacggggacacttctt

SEQ ID NO: 990 - DNA, 21 bp, synthetic construct
  misc_feature 1..21: note = Description of Artificial Sequence: Synthetic oligonucleotide
  source 1..21: mol_type = other DNA
  misc_feature 1..19: note = RNA
  misc_feature 20..21: note = DNA
aagtgtccccgtaattatgtt

SEQ ID NO: 991 - DNA, 21 bp, synthetic construct
  misc_feature 1..21: note = Description of Artificial Sequence: Synthetic oligonucleotide
  source 1..21: mol_type = other DNA
  misc_feature 1..19: note = RNA
  misc_feature 20..21: note = DNA
cataattacggggacactttt

SEQ ID NO: 992 - DNA, 21 bp, synthetic construct
  misc_feature 1..21: note = Description of Artificial Sequence: Synthetic oligonucleotide
  source 1..21: mol_type = other DNA
  misc_feature 1..19: note = RNA
  misc_feature 20..21: note = DNA
agtgtccccgtaattatgttt

SEQ ID NO: 993 - DNA, 21 bp, synthetic construct
  misc_feature 1..21: note = Description of Artificial Sequence: Synthetic oligonucleotide
  source 1..21: mol_type = other DNA
  misc_feature 1..19: note = RNA
  misc_feature 20..21: note = DNA
acataattacggggacacttt

SEQ ID NO: 994 - DNA, 21 bp, synthetic construct
  misc_feature 1..21: note = Description of Artificial Sequence: Synthetic oligonucleotide
  source 1..21: mol_type = other DNA
  misc_feature 1..19: note = RNA
  misc_feature 20..21: note = DNA
gtgtccccgtaattatgtgtt

SEQ ID NO: 995 - DNA, 21 bp, synthetic construct
  misc_feature 1..21: note = Description of Artificial Sequence: Synthetic oligonucleotide
  source 1..21: mol_type = other DNA
  misc_feature 1..19: note = RNA
  misc_feature 20..21: note = DNA
cacataattacggggacactt

SEQ ID NO: 996 - DNA, 21 bp, synthetic construct
  misc_feature 1..21: note = Description of Artificial Sequence: Synthetic oligonucleotide
  source 1..21: mol_type = other DNA
  misc_feature 1..19: note = RNA
  misc_feature 20..21: note = DNA
tgtccccgtaattatgtggtt

SEQ ID NO: 997 - DNA, 21 bp, synthetic construct
  misc_feature 1..21: note = Description of Artificial Sequence: Synthetic oligonucleotide
  source 1..21: mol_type = other DNA
  misc_feature 1..19: note = RNA
  misc_feature 20..21: note = DNA
ccacataattacggggacatt

SEQ ID NO: 998 - DNA, 21 bp, synthetic construct
  misc_feature 1..21: note = Description of Artificial Sequence: Synthetic oligonucleotide
  source 1..21: mol_type = other DNA
  misc_feature 1..19: note = RNA
  misc_feature 20..21: note = DNA
gtccccgtaattatgtggttt

SEQ ID NO: 999 - DNA, 21 bp, synthetic construct
  misc_feature 1..21: note = Description of Artificial Sequence: Synthetic oligonucleotide
  source 1..21: mol_type = other DNA
  misc_feature 1..19: note = RNA
  misc_feature 20..21: note = DNA
accacataattacggggactt

SEQ ID NO: 1000 - DNA, 21 bp, synthetic construct
  misc_feature 1..21: note = Description of Artificial Sequence: Synthetic oligonucleotide
  source 1..21: mol_type = other DNA
  misc_feature 1..19: note = RNA
  misc_feature 20..21: note = DNA
ccccgtaattatgtggtgatt

SEQ ID NO: 1001 - DNA, 21 bp, synthetic construct
  misc_feature 1..21: note = Description of Artificial Sequence: Synthetic oligonucleotide
  source 1..21: mol_type = other DNA
  misc_feature 1..19: note = RNA
  misc_feature 20..21: note = DNA
tcaccacataattacggggtt

SEQ ID NO: 1002 - DNA, 21 bp, synthetic construct
  misc_feature 1..21: note = Description of Artificial Sequence: Synthetic oligonucleotide
  source 1..21: mol_type = other DNA
  misc_feature 1..19: note = RNA
  misc_feature 20..21: note = DNA
ccgtaattatgtggtgacatt

SEQ ID NO: 1003 - DNA, 21 bp, synthetic construct
  misc_feature 1..21: note = Description of Artificial Sequence: Synthetic oligonucleotide
  source 1..21: mol_type = other DNA
  misc_feature 1..19: note = RNA
  misc_feature 20..21: note = DNA
tgtcaccacataattacggtt

SEQ ID NO: 1004 - DNA, 21 bp, synthetic construct
  misc_feature 1..21: note = Description of Artificial Sequence: Synthetic oligonucleotide
  source 1..21: mol_type = other DNA
  misc_feature 1..19: note = RNA
  misc_feature 20..21: note = DNA
gtaattatgtggtgacagatt

SEQ ID NO: 1005 - DNA, 21 bp, synthetic construct
  misc_feature 1..21: note = Description of Artificial Sequence: Synthetic oligonucleotide
  source 1..21: mol_type = other DNA
  misc_feature 1..19: note = RNA
  misc_feature 20..21: note = DNA
tctgtcaccacataattactt

SEQ ID NO: 1006 - DNA, 21 bp, synthetic construct
  misc_feature 1..21: note = Description of Artificial Sequence: Synthetic oligonucleotide
  source 1..21: mol_type = other DNA
  misc_feature 1..19: note = RNA
  misc_feature 20..21: note = DNA
taattatgtggtgacagattt

SEQ ID NO: 1007 - DNA, 21 bp, synthetic construct
  misc_feature 1..21: note = Description of Artificial Sequence: Synthetic oligonucleotide
  source 1..21: mol_type = other DNA
  misc_feature 1..19: note = RNA
  misc_feature 20..21: note = DNA
atctgtcaccacataattatt

SEQ ID NO: 1008 - DNA, 21 bp, synthetic construct
  misc_feature 1..21: note = Description of Artificial Sequence: Synthetic oligonucleotide
  source 1..21: mol_type = other DNA
  misc_feature 1..19: note = RNA
  misc_feature 20..21: note = DNA
aattatgtggtgacagatctt

SEQ ID NO: 1009 - DNA, 21 bp, synthetic construct
  misc_feature 1..21: note = Description of Artificial Sequence: Synthetic oligonucleotide
  source 1..21: mol_type = other DNA
  misc_feature 1..19: note = RNA
  misc_feature 20..21: note = DNA
gatctgtcaccacataatttt

SEQ ID NO: 1010 - DNA, 21 bp, synthetic construct
  misc_feature 1..21: note = Description of Artificial Sequence: Synthetic oligonucleotide
  source 1..21: mol_type = other DNA
  misc_feature 1..19: note = RNA
  misc_feature 20..21: note = DNA
attatgtggtgacagatcatt

SEQ ID NO: 1011 - DNA, 21 bp, synthetic construct
  misc_feature 1..21: note = Description of Artificial Sequence: Synthetic oligonucleotide
  source 1..21: mol_type = other DNA
  misc_feature 1..19: note = RNA
  misc_feature 20..21: note = DNA
tgatctgtcaccacataattt

SEQ ID NO: 1012 - DNA, 21 bp, synthetic construct
  misc_feature 1..21: note = Description of Artificial Sequence: Synthetic oligonucleotide
  source 1..21: mol_type = other DNA
  misc_feature 1..19: note = RNA
  misc_feature 20..21: note = DNA
ttatgtggtgacagatcactt

SEQ ID NO: 1013 - DNA, 21 bp, synthetic construct
  misc_feature 1..21: note = Description of Artificial Sequence: Synthetic oligonucleotide
  source 1..21: mol_type = other DNA
  misc_feature 1..19: note = RNA
  misc_feature 20..21: note = DNA
gtgatctgtcaccacataatt

SEQ ID NO: 1014 - DNA, 21 bp, synthetic construct
  misc_feature 1..21: note = Description of Artificial Sequence: Synthetic oligonucleotide
  source 1..21: mol_type = other DNA
  misc_feature 1..19: note = RNA
  misc_feature 20..21: note = DNA
atgtggtgacagatcacggtt

SEQ ID NO: 1015 - DNA, 21 bp, synthetic construct
  misc_feature 1..21: note = Description of Artificial Sequence: Synthetic oligonucleotide
  source 1..21: mol_type = other DNA
  misc_feature 1..19: note = RNA
  misc_feature 20..21: note = DNA
ccgtgatctgtcaccacattt

SEQ ID NO: 1016 - DNA, 21 bp, synthetic construct
  misc_feature 1..21: note = Description of Artificial Sequence: Synthetic oligonucleotide
  source 1..21: mol_type = other DNA
  misc_feature 1..19: note = RNA
  misc_feature 20..21: note = DNA
tggtgacagatcacggctctt

SEQ ID NO: 1017 - DNA, 21 bp, synthetic construct
  misc_feature 1..21: note = Description of Artificial Sequence: Synthetic oligonucleotide
  source 1..21: mol_type = other DNA
  misc_feature 1..19: note = RNA
  misc_feature 20..21: note = DNA
gagccgtgatctgtcaccatt

SEQ ID NO: 1018 - DNA, 21 bp, synthetic construct
  misc_feature 1..21: note = Description of Artificial Sequence: Synthetic oligonucleotide
  source 1..21: mol_type = other DNA
  misc_feature 1..19: note = RNA
  misc_feature 20..21: note = DNA
gtgacagatcacggctcgttt

SEQ ID NO: 1019 - DNA, 21 bp, synthetic construct
  misc_feature 1..21: note = Description of Artificial Sequence: Synthetic oligonucleotide
  source 1..21: mol_type = other DNA
  misc_feature 1..19: note = RNA
  misc_feature 20..21: note = DNA
acgagccgtgatctgtcactt

SEQ ID NO: 1020 - DNA, 21 bp, synthetic construct
  misc_feature 1..21: note = Description of Artificial Sequence: Synthetic oligonucleotide
  source 1..21: mol_type = other DNA
  misc_feature 1..19: note = RNA
  misc_feature 20..21: note = DNA
tgacagatcacggctcgtgtt

SEQ ID NO: 1021 - DNA, 21 bp, synthetic construct
  misc_feature 1..21: note = Description of Artificial Sequence: Synthetic oligonucleotide
  source 1..21: mol_type = other DNA
  misc_feature 1..19: note = RNA
  misc_feature 20..21: note = DNA
cacgagccgtgatctgtcatt

SEQ ID NO: 1022 - DNA, 21 bp, synthetic construct
  misc_feature 1..21: note = Description of Artificial Sequence: Synthetic oligonucleotide
  source 1..21: mol_type = other DNA
  misc_feature 1..19: note = RNA
  misc_feature 20..21: note = DNA
gacagatcacggctcgtgctt

SEQ ID NO: 1023 - DNA, 21 bp, synthetic construct
  misc_feature 1..21: note = Description of Artificial Sequence: Synthetic oligonucleotide
  source 1..21: mol_type = other DNA
  misc_feature 1..19: note = RNA
  misc_feature 20..21: note = DNA
gcacgagccgtgatctgtctt

SEQ ID NO: 1024 - DNA, 21 bp, synthetic construct
  misc_feature 1..21: note = Description of Artificial Sequence: Synthetic oligonucleotide
  source 1..21: mol_type = other DNA
  misc_feature 1..19: note = RNA
  misc_feature 20..21: note = DNA
acagatcacggctcgtgcgtt

SEQ ID NO: 1025 - DNA, 21 bp, synthetic construct
  misc_feature 1..21: note = Description of Artificial Sequence: Synthetic oligonucleotide
  source 1..21: mol_type = other DNA
  misc_feature 1..19: note = RNA
  misc_feature 20..21: note = DNA
cgcacgagccgtgatctgttt

SEQ ID NO: 1026 - DNA, 21 bp, synthetic construct
  misc_feature 1..21: note = Description of Artificial Sequence: Synthetic oligonucleotide
  source 1..21: mol_type = other DNA
  misc_feature 1..19: note = RNA
  misc_feature 20..21: note = DNA
cagatcacggctcgtgcgttt

SEQ ID NO: 1027 - DNA, 21 bp, synthetic construct
  misc_feature 1..21: note = Description of Artificial Sequence: Synthetic oligonucleotide
  source 1..21: mol_type = other DNA
  misc_feature 1..19: note = RNA
  misc_feature 20..21: note = DNA
acgcacgagccgtgatctgtt

SEQ ID NO: 1028 - DNA, 21 bp, synthetic construct
  misc_feature 1..21: note = Description of Artificial Sequence: Synthetic oligonucleotide
  source 1..21: mol_type = other DNA
  misc_feature 1..19: note = RNA
  misc_feature 20..21: note = DNA
agatcacggctcgtgcgtctt

SEQ ID NO: 1029 - DNA, 21 bp, synthetic construct
  misc_feature 1..21: note = Description of Artificial Sequence: Synthetic oligonucleotide
  source 1..21: mol_type = other DNA
  misc_feature 1..19: note = RNA
  misc_feature 20..21: note = DNA
gacgcacgagccgtgatcttt

SEQ ID NO: 1030 - DNA, 21 bp, synthetic construct
  misc_feature 1..21: note = Description of Artificial Sequence: Synthetic oligonucleotide
  source 1..21: mol_type = other DNA
  misc_feature 1..19: note = RNA
  misc_feature 20..21: note = DNA
gatcacggctcgtgcgtcctt

SEQ ID NO: 1031 - DNA, 21 bp, synthetic construct
  misc_feature 1..21: note = Description of Artificial Sequence: Synthetic oligonucleotide
  source 1..21: mol_type = other DNA
  misc_feature 1..19: note = RNA
  misc_feature 20..21: note = DNA
ggacgcacgagccgtgatctt

SEQ ID NO: 1032 - DNA, 21 bp, synthetic construct
  misc_feature 1..21: note = Description of Artificial Sequence: Synthetic oligonucleotide
  source 1..21: mol_type = other DNA
  misc_feature 1..19: note = RNA
  misc_feature 20..21: note = DNA
atcacggctcgtgcgtccgtt

SEQ ID NO: 1033 - DNA, 21 bp, synthetic construct
  misc_feature 1..21: note = Description of Artificial Sequence: Synthetic oligonucleotide
  source 1..21: mol_type = other DNA
  misc_feature 1..19: note = RNA
  misc_feature 20..21: note = DNA
cggacgcacgagccgtgattt

SEQ ID NO: 1034 - DNA, 21 bp, synthetic construct
  misc_feature 1..21: note = Description of Artificial Sequence: Synthetic oligonucleotide
  source 1..21: mol_type = other DNA
  misc_feature 1..19: note = RNA
  misc_feature 20..21: note = DNA
tcacggctcgtgcgtccgatt

SEQ ID NO: 1035 - DNA, 21 bp, synthetic construct
  misc_feature 1..21: note = Description of Artificial Sequence: Synthetic oligonucleotide
  source 1..21: mol_type = other DNA
  misc_feature 1..19: note = RNA
  misc_feature 20..21: note = DNA
tcggacgcacgagccgtgatt

SEQ ID NO: 1036 - DNA, 21 bp, synthetic construct
  misc_feature 1..21: note = Description of Artificial Sequence: Synthetic oligonucleotide
  source 1..21: mol_type = other DNA
  misc_feature 1..19: note = RNA
  misc_feature 20..21: note = DNA
cacggctcgtgcgtccgagtt

SEQ ID NO: 1037 - DNA, 21 bp, synthetic construct
  misc_feature 1..21: note = Description of Artificial Sequence: Synthetic oligonucleotide
  source 1..21: mol_type = other DNA
  misc_feature 1..19: note = RNA
  misc_feature 20..21: note = DNA
ctcggacgcacgagccgtgtt

SEQ ID NO: 1038 - DNA, 21 bp, synthetic construct
  misc_feature 1..21: note = Description of Artificial Sequence: Synthetic oligonucleotide
  source 1..21: mol_type = other DNA
  misc_feature 1..19: note = RNA
  misc_feature 20..21: note = DNA
acggctcgtgcgtccgagctt

SEQ ID NO: 1039 - DNA, 21 bp, synthetic construct
  misc_feature 1..21: note = Description of Artificial Sequence: Synthetic oligonucleotide
  source 1..21: mol_type = other DNA
  misc_feature 1..19: note = RNA
  misc_feature 20..21: note = DNA
gctcggacgcacgagccgttt

SEQ ID NO: 1040 - DNA, 21 bp, synthetic construct
  misc_feature 1..21: note = Description of Artificial Sequence: Synthetic oligonucleotide
  source 1..21: mol_type = other DNA
  misc_feature 1..19: note = RNA
  misc_feature 20..21: note = DNA
gctcgtgcgtccgagcctgtt

SEQ ID NO: 1041 - DNA, 21 bp, synthetic construct
  misc_feature 1..21: note = Description of Artificial Sequence: Synthetic oligonucleotide
  source 1..21: mol_type = other DNA
  misc_feature 1..19: note = RNA
  misc_feature 20..21: note = DNA
caggctcggacgcacgagctt

SEQ ID NO: 1042 - DNA, 21 bp, synthetic construct
  misc_feature 1..21: note = Description of Artificial Sequence: Synthetic oligonucleotide
  source 1..21: mol_type = other DNA
  misc_feature 1..19: note = RNA
  misc_feature 20..21: note = DNA
ggaggaagacggcgtccgctt

SEQ ID NO: 1043 - DNA, 21 bp, synthetic construct
  misc_feature 1..21: note = Description of Artificial Sequence: Synthetic oligonucleotide
  source 1..21: mol_type = other DNA
  misc_feature 1..19: note = RNA
  misc_feature 20..21: note = DNA
gcggacgccgtcttcctcctt

SEQ ID NO: 1044 - DNA, 21 bp, synthetic construct
  misc_feature 1..21: note = Description of Artificial Sequence: Synthetic oligonucleotide
  source 1..21: mol_type = other DNA
  misc_feature 1..19: note = RNA
  misc_feature 20..21: note = DNA
gaggaagacggcgtccgcatt

SEQ ID NO: 1045 - DNA, 21 bp, synthetic construct
  misc_feature 1..21: note = Description of Artificial Sequence: Synthetic oligonucleotide
  source 1..21: mol_type = other DNA
  misc_feature 1..19: note = RNA
  misc_feature 20..21: note = DNA
tgcggacgccgtcttcctctt

SEQ ID NO: 1046 - DNA, 21 bp, synthetic construct
  misc_feature 1..21: note = Description of Artificial Sequence: Synthetic oligonucleotide
  source 1..21: mol_type = other DNA
  misc_feature 1..19: note = RNA
  misc_feature 20..21: note = DNA
ggaagacggcgtccgcaagtt

SEQ ID NO: 1047 - DNA, 21 bp, synthetic construct
  misc_feature 1..21: note = Description of Artificial Sequence: Synthetic oligonucleotide
  source 1..21: mol_type = other DNA
  misc_feature 1..19: note = RNA
  misc_feature 20..21: note = DNA
cttgcggacgccgtcttcctt

SEQ ID NO: 1048 - DNA, 21 bp, synthetic construct
  misc_feature 1..21: note = Description of Artificial Sequence: Synthetic oligonucleotide
  source 1..21: mol_type = other DNA
  misc_feature 1..19: note = RNA
  misc_feature 20..21: note = DNA
gaagacggcgtccgcaagttt

SEQ ID NO: 1049 - DNA, 21 bp, synthetic construct
  misc_feature 1..21: note = Description of Artificial Sequence: Synthetic oligonucleotide
  source 1..21: mol_type = other DNA
  misc_feature 1..19: note = RNA
  misc_feature 20..21: note = DNA
acttgcggacgccgtcttctt

SEQ ID NO: 1050 - DNA, 21 bp, synthetic construct
  misc_feature 1..21: note = Description of Artificial Sequence: Synthetic oligonucleotide
  source 1..21: mol_type = other DNA
  misc_feature 1..19: note = RNA
  misc_feature 20..21: note = DNA
aagacggcgtccgcaagtgtt

SEQ ID NO: 1051 - DNA, 21 bp, synthetic construct
  misc_feature 1..21: note = Description of Artificial Sequence: Synthetic oligonucleotide
  source 1..21: mol_type = other DNA
  misc_feature 1..19: note = RNA
  misc_feature 20..21: note = DNA
cacttgcggacgccgtctttt

SEQ ID NO: 1052 - DNA, 21 bp, synthetic construct
  misc_feature 1..21: note = Description of Artificial Sequence: Synthetic oligonucleotide
  source 1..21: mol_type = other DNA
  misc_feature 1..19: note = RNA
  misc_feature 20..21: note = DNA
gacggcgtccgcaagtgtatt

SEQ ID NO: 1053 - DNA, 21 bp, synthetic construct
  misc_feature 1..21: note = Description of Artificial Sequence: Synthetic oligonucleotide
  source 1..21: mol_type = other DNA
  misc_feature 1..19: note = RNA
  misc_feature 20..21: note = DNA
tacacttgcggacgccgtctt

SEQ ID NO: 1054 - DNA, 21 bp, synthetic construct
  misc_feature 1..21: note = Description of Artificial Sequence: Synthetic oligonucleotide
  source 1..21: mol_type = other DNA
  misc_feature 1..19: note = RNA
  misc_feature 20..21: note = DNA
acggcgtccgcaagtgtaatt

SEQ ID NO: 1055 - DNA, 21 bp, synthetic construct
  misc_feature 1..21: note = Description of Artificial Sequence: Synthetic oligonucleotide
  source 1..21: mol_type = other DNA
  misc_feature 1..19: note = RNA
  misc_feature 20..21: note = DNA
ttacacttgcggacgccgttt

SEQ ID NO: 1056 - DNA, 21 bp, synthetic construct
  misc_feature 1..21: note = Description of Artificial Sequence: Synthetic oligonucleotide
  source 1..21: mol_type = other DNA
  misc_feature 1..19: note = RNA
  misc_feature 20..21: note = DNA
gcgtccgcaagtgtaagaatt

SEQ ID NO: 1057 - DNA, 21 bp, synthetic construct
  misc_feature 1..21: note = Description of Artificial Sequence: Synthetic oligonucleotide
  source 1..21: mol_type = other DNA
  misc_feature 1..19: note = RNA
  misc_feature 20..21: note = DNA
ttcttacacttgcggacgctt

SEQ ID NO: 1058 - DNA, 21 bp, synthetic construct
  misc_feature 1..21: note = Description of Artificial Sequence: Synthetic oligonucleotide
  source 1..21: mol_type = other DNA
  misc_feature 1..19: note = RNA
  misc_feature 20..21: note = DNA
cgtccgcaagtgtaagaagtt

SEQ ID NO: 1059 - DNA, 21 bp, synthetic construct
  misc_feature 1..21: note = Description of Artificial Sequence: Synthetic oligonucleotide
  source 1..21: mol_type = other DNA
  misc_feature 1..19: note = RNA
  misc_feature 20..21: note = DNA
cttcttacacttgcggacgtt

SEQ ID NO: 1060 - DNA, 21 bp, synthetic construct
  misc_feature 1..21: note = Description of Artificial Sequence: Synthetic oligonucleotide
  source 1..21: mol_type = other DNA
  misc_feature 1..19: note = RNA
  misc_feature 20..21: note = DNA
gtccgcaagtgtaagaagttt

SEQ ID NO: 1061 - DNA, 21 bp, synthetic construct
  misc_feature 1..21: note = Description of Artificial Sequence: Synthetic oligonucleotide
  source 1..21: mol_type = other DNA
  misc_feature 1..19: note = RNA
  misc_feature 20..21: note = DNA
acttcttacacttgcggactt

SEQ ID NO: 1062 - DNA, 21 bp, synthetic construct
  misc_feature 1..21: note = Description of Artificial Sequence: Synthetic oligonucleotide
  source 1..21: mol_type = other DNA
  misc_feature 1..19: note = RNA
  misc_feature 20..21: note = DNA
tccgcaagtgtaagaagtgtt

SEQ ID NO: 1063 - DNA, 21 bp, synthetic construct
  misc_feature 1..21: note = Description of Artificial Sequence: Synthetic oligonucleotide
  source 1..21: mol_type = other DNA
  misc_feature 1..19: note = RNA
  misc_feature 20..21: note = DNA
cacttcttacacttgcggatt

SEQ ID NO: 1064 - DNA, 21 bp, synthetic construct
  misc_feature 1..21: note = Description of Artificial Sequence: Synthetic oligonucleotide
  source 1..21: mol_type = other DNA
  misc_feature 1..19: note = RNA
  misc_feature 20..21: note = DNA
ccgcaagtgtaagaagtgctt

SEQ ID NO: 1065 - DNA, 21 bp, synthetic construct
  misc_feature 1..21: note = Description of Artificial Sequence: Synthetic oligonucleotide
  source 1..21: mol_type = other DNA
  misc_feature 1..19: note = RNA
  misc_feature 20..21: note = DNA
gcacttcttacacttgcggtt

SEQ ID NO: 1066 - DNA, 21 bp, synthetic construct
  misc_feature 1..21: note = Description of Artificial Sequence: Synthetic oligonucleotide
  source 1..21: mol_type = other DNA
  misc_feature 1..19: note = RNA
  misc_feature 20..21: note = DNA
cgcaagtgtaagaagtgcgtt

SEQ ID NO: 1067 - DNA, 21 bp, synthetic construct
  misc_feature 1..21: note = Description of Artificial Sequence: Synthetic oligonucleotide
  source 1..21: mol_type = other DNA
  misc_feature 1..19: note = RNA
  misc_feature 20..21: note = DNA
cgcacttcttacacttgcgtt

SEQ ID NO: 1068 - DNA, 21 bp, synthetic construct
  misc_feature 1..21: note = Description of Artificial Sequence: Synthetic oligonucleotide
  source 1..21: mol_type = other DNA
  misc_feature 1..19: note = RNA
  misc_feature 20..21: note = DNA
gcaagtgtaagaagtgcgatt

SEQ ID NO: 1069 - DNA, 21 bp, synthetic construct
  misc_feature 1..21: note = Description of Artificial Sequence: Synthetic oligonucleotide
  source 1..21: mol_type = other DNA
  misc_feature 1..19: note = RNA
  misc_feature 20..21: note = DNA
tcgcacttcttacacttgctt

SEQ ID NO: 1070 - DNA, 21 bp, synthetic construct
  misc_feature 1..21: note = Description of Artificial Sequence: Synthetic oligonucleotide
  source 1..21: mol_type = other DNA
  misc_feature 1..19: note = RNA
  misc_feature 20..21: note = DNA
aagtgtaagaagtgcgaagtt

SEQ ID NO: 1071 - DNA, 21 bp, synthetic construct
  misc_feature 1..21: note = Description of Artificial Sequence: Synthetic oligonucleotide
  source 1..21: mol_type = other DNA
  misc_feature 1..19: note = RNA
  misc_feature 20..21: note = DNA
cttcgcacttcttacactttt

SEQ ID NO: 1072 - DNA, 21 bp, synthetic construct
  misc_feature 1..21: note = Description of Artificial Sequence: Synthetic oligonucleotide
  source 1..21: mol_type = other DNA
  misc_feature 1..19: note = RNA
  misc_feature 20..21: note = DNA
agtgtaagaagtgcgaaggtt

SEQ ID NO: 1073 - DNA, 21 bp, synthetic construct
  misc_feature 1..21: note = Description of Artificial Sequence: Synthetic oligonucleotide
  source 1..21: mol_type = other DNA
  misc_feature 1..19: note = RNA
  misc_feature 20..21: note = DNA
ccttcgcacttcttacacttt

SEQ ID NO: 1074 - DNA, 21 bp, synthetic construct
  misc_feature 1..21: note = Description of Artificial Sequence: Synthetic oligonucleotide
  source 1..21: mol_type = other DNA
  misc_feature 1..19: note = RNA
  misc_feature 20..21: note = DNA
gtgtaagaagtgcgaagggtt

SEQ ID NO: 1075 - DNA, 21 bp, synthetic construct
  misc_feature 1..21: note = Description of Artificial Sequence: Synthetic oligonucleotide
  source 1..21: mol_type = other DNA
  misc_feature 1..19: note = RNA
  misc_feature 20..21: note = DNA
cccttcgcacttcttacactt

SEQ ID NO: 1076 - DNA, 21 bp, synthetic construct
  misc_feature 1..21: note = Description of Artificial Sequence: Synthetic oligonucleotide
  source 1..21: mol_type = other DNA
  misc_feature 1..19: note = RNA
  misc_feature 20..21: note = DNA
tgtaagaagtgcgaagggctt

SEQ ID NO: 1077 - DNA, 21 bp, synthetic construct
  misc_feature 1..21: note = Description of Artificial Sequence: Synthetic oligonucleotide
  source 1..21: mol_type = other DNA
  misc_feature 1..19: note = RNA
  misc_feature 20..21: note = DNA
gcccttcgcacttcttacatt

SEQ ID NO: 1078 - DNA, 21 bp, synthetic construct
  misc_feature 1..21: note = Description of Artificial Sequence: Synthetic oligonucleotide
  source 1..21: mol_type = other DNA
  misc_feature 1..19: note = RNA
  misc_feature 20..21: note = DNA
gtaagaagtgcgaagggcctt

SEQ ID NO: 1079 - DNA, 21 bp, synthetic construct
  misc_feature 1..21: note = Description of Artificial Sequence: Synthetic oligonucleotide
  source 1..21: mol_type = other DNA
  misc_feature 1..19: note = RNA
  misc_feature 20..21: note = DNA
ggcccttcgcacttcttactt

SEQ ID NO: 1080 - DNA, 21 bp, synthetic construct
  misc_feature 1..21: note = Description of Artificial Sequence: Synthetic oligonucleotide
  source 1..21: mol_type = other DNA
  misc_feature 1..19: note = RNA
  misc_feature 20..21: note = DNA
taagaagtgcgaagggccttt

SEQ ID NO: 1081 - DNA, 21 bp, synthetic construct
  misc_feature 1..21: note = Description of Artificial Sequence: Synthetic oligonucleotide
  source 1..21: mol_type = other DNA
  misc_feature 1..19: note = RNA
  misc_feature 20..21: note = DNA
aggcccttcgcacttcttatt

SEQ ID NO: 1082 - DNA, 21 bp, synthetic construct
  misc_feature 1..21: note = Description of Artificial Sequence: Synthetic oligonucleotide
  source 1..21: mol_type = other DNA
  misc_feature 1..19: note = RNA
  misc_feature 20..21: note = DNA
aagaagtgcgaagggcctttt

SEQ ID NO: 1083 - DNA, 21 bp, synthetic construct
  misc_feature 1..21: note = Description of Artificial Sequence: Synthetic oligonucleotide
  source 1..21: mol_type = other DNA
  misc_feature 1..19: note = RNA
  misc_feature 20..21: note = DNA
aaggcccttcgcacttctttt

SEQ ID NO: 1084 - DNA, 21 bp, synthetic construct
  misc_feature 1..21: note = Description of Artificial Sequence: Synthetic oligonucleotide
  source 1..21: mol_type = other DNA
  misc_feature 1..19: note = RNA
  misc_feature 20..21: note = DNA
agaagtgcgaagggccttgtt

SEQ ID NO: 1085 - DNA, 21 bp, synthetic construct
  misc_feature 1..21: note = Description of Artificial Sequence: Synthetic oligonucleotide
  source 1..21: mol_type = other DNA
  misc_feature 1..19: note = RNA
  misc_feature 20..21: note = DNA
caaggcccttcgcacttcttt

SEQ ID NO: 1086 - DNA, 21 bp, synthetic construct
  misc_feature 1..21: note = Description of Artificial Sequence: Synthetic oligonucleotide
  source 1..21: mol_type = other DNA
  misc_feature 1..19: note = RNA
  misc_feature 20..21: note = DNA
agtgcgaagggccttgccgtt

SEQ ID NO: 1087 - DNA, 21 bp, synthetic construct
  misc_feature 1..21: note = Description of Artificial Sequence: Synthetic oligonucleotide
  source 1..21: mol_type = other DNA
  misc_feature 1..19: note = RNA
  misc_feature 20..21: note = DNA
cggcaaggcccttcgcacttt

SEQ ID NO: 1088 - DNA, 21 bp, synthetic construct
  misc_feature 1..21: note = Description of Artificial Sequence: Synthetic oligonucleotide
  source 1..21: mol_type = other DNA
  misc_feature 1..19: note = RNA
  misc_feature 20..21: note = DNA
gtgcgaagggccttgccgctt

SEQ ID NO: 1089 - DNA, 21 bp, synthetic construct
  misc_feature 1..21: note = Description of Artificial Sequence: Synthetic oligonucleotide
  source 1..21: mol_type = other DNA
  misc_feature 1..19: note = RNA
  misc_feature 20..21: note = DNA
gcggcaaggcccttcgcactt

SEQ ID NO: 1090 - DNA, 21 bp, synthetic construct
  misc_feature 1..21: note = Description of Artificial Sequence: Synthetic oligonucleotide
  source 1..21: mol_type = other DNA
  misc_feature 1..19: note = RNA
  misc_feature 20..21: note = DNA
tgcgaagggccttgccgcatt

SEQ ID NO: 1091 - DNA, 21 bp, synthetic construct
  misc_feature 1..21: note = Description of Artificial Sequence: Synthetic oligonucleotide
  source 1..21: mol_type = other DNA
  misc_feature 1..19: note = RNA
  misc_feature 20..21: note = DNA
tgcggcaaggcccttcgcatt

SEQ ID NO: 1092 - DNA, 21 bp, synthetic construct
  misc_feature 1..21: note = Description of Artificial Sequence: Synthetic oligonucleotide
  source 1..21: mol_type = other DNA
  misc_feature 1..19: note = RNA
  misc_feature 20..21: note = DNA
gcgaagggccttgccgcaatt

SEQ ID NO: 1093 - DNA, 21 bp, synthetic construct
  misc_feature 1..21: note = Description of Artificial Sequence: Synthetic oligonucleotide
  source 1..21: mol_type = other DNA
  misc_feature 1..19: note = RNA
  misc_feature 20..21: note = DNA
ttgcggcaaggcccttcgctt

SEQ ID NO: 1094 - DNA, 21 bp, synthetic construct
  misc_feature 1..21: note = Description of Artificial Sequence: Synthetic oligonucleotide
  source 1..21: mol_type = other DNA
  misc_feature 1..19: note = RNA
  misc_feature 20..21: note = DNA
cgaagggccttgccgcaaatt

SEQ ID NO: 1095 - DNA, 21 bp, synthetic construct
  misc_feature 1..21: note = Description of Artificial Sequence: Synthetic oligonucleotide
  source 1..21: mol_type = other DNA
  misc_feature 1..19: note = RNA
  misc_feature 20..21: note = DNA
tttgcggcaaggcccttcgtt

SEQ ID NO: 1096 - DNA, 21 bp, synthetic construct
  misc_feature 1..21: note = Description of Artificial Sequence: Synthetic oligonucleotide
  source 1..21: mol_type = other DNA
  misc_feature 1..19: note = RNA
  misc_feature 20..21: note = DNA
aagggccttgccgcaaagttt

SEQ ID NO: 1097 - DNA, 21 bp, synthetic construct
  misc_feature 1..21: note = Description of Artificial Sequence: Synthetic oligonucleotide
  source 1..21: mol_type = other DNA
  misc_feature 1..19: note = RNA
  misc_feature 20..21: note = DNA
actttgcggcaaggccctttt

SEQ ID NO: 1098 - DNA, 21 bp, synthetic construct
  misc_feature 1..21: note = Description of Artificial Sequence: Synthetic oligonucleotide
  source 1..21: mol_type = other DNA
  misc_feature 1..19: note = RNA
  misc_feature 20..21: note = DNA
agggccttgccgcaaagtgtt

SEQ ID NO: 1099 - DNA, 21 bp, synthetic construct
  misc_feature 1..21: note = Description of Artificial Sequence: Synthetic oligonucleotide
  source 1..21: mol_type = other DNA
  misc_feature 1..19: note = RNA
  misc_feature 20..21: note = DNA
cactttgcggcaaggcccttt

SEQ ID NO: 1100 - DNA, 21 bp, synthetic construct
  misc_feature 1..21: note = Description of Artificial Sequence: Synthetic oligonucleotide
  source 1..21: mol_type = other DNA
  misc_feature 1..19: note = RNA
  misc_feature 20..21: note = DNA
gggccttgccgcaaagtgttt

SEQ ID NO: 1101 - DNA, 21 bp, synthetic construct
  misc_feature 1..21: note = Description of Artificial Sequence: Synthetic oligonucleotide
  source 1..21: mol_type = other DNA
  misc_feature 1..19: note = RNA
  misc_feature 20..21: note = DNA
acactttgcggcaaggccctt

SEQ ID NO: 1102 - DNA, 21 bp, synthetic construct
  misc_feature 1..21: note = Description of Artificial Sequence: Synthetic oligonucleotide
  source 1..21: mol_type = other DNA
  misc_feature 1..19: note = RNA
  misc_feature 20..21: note = DNA
ggccttgccgcaaagtgtgtt

SEQ ID NO: 1103 - DNA, 21 bp, synthetic construct
  misc_feature 1..21: note = Description of Artificial Sequence: Synthetic oligonucleotide
  source 1..21: mol_type = other DNA
  misc_feature 1..19: note = RNA
  misc_feature 20..21: note = DNA
cacactttgcggcaaggcctt

SEQ ID NO: 1104 - DNA, 21 bp, synthetic construct
  misc_feature 1..21: note = Description of Artificial Sequence: Synthetic oligonucleotide
  source 1..21: mol_type = other DNA
  misc_feature 1..19: note = RNA
  misc_feature 20..21: note = DNA
gccttgccgcaaagtgtgttt

SEQ ID NO: 1105 - DNA, 21 bp, synthetic construct
  misc_feature 1..21: note = Description of Artificial Sequence: Synthetic oligonucleotide
  source 1..21: mol_type = other DNA
  misc_feature 1..19: note = RNA
  misc_feature 20..21: note = DNA
acacactttgcggcaaggctt

SEQ ID NO: 1106 - DNA, 21 bp, synthetic construct
  misc_feature 1..21: note = Description of Artificial Sequence: Synthetic oligonucleotide
  source 1..21: mol_type = other DNA
  misc_feature 1..19: note = RNA
  misc_feature 20..21: note = DNA
cttgccgcaaagtgtgtaatt

SEQ ID NO: 1107 - DNA, 21 bp, synthetic construct
  misc_feature 1..21: note = Description of Artificial Sequence: Synthetic oligonucleotide
  source 1..21: mol_type = other DNA
  misc_feature 1..19: note = RNA
  misc_feature 20..21: note = DNA
ttacacactttgcggcaagtt

SEQ ID NO: 1108 - DNA, 21 bp, synthetic construct
  misc_feature 1..21: note = Description of Artificial Sequence: Synthetic oligonucleotide
  source 1..21: mol_type = other DNA
  misc_feature 1..19: note = RNA
  misc_feature 20..21: note = DNA
ggaataggtattggtgaattt

SEQ ID NO: 1109 - DNA, 21 bp, synthetic construct
  misc_feature 1..21: note = Description of Artificial Sequence: Synthetic oligonucleotide
  source 1..21: mol_type = other DNA
  misc_feature 1..19: note = RNA
  misc_feature 20..21: note = DNA
attcaccaatacctattcctt

SEQ ID NO: 1110 - DNA, 21 bp, synthetic construct
  misc_feature 1..21: note = Description of Artificial Sequence: Synthetic oligonucleotide
  source 1..21: mol_type = other DNA
  misc_feature 1..19: note = RNA
  misc_feature 20..21: note = DNA
gaataggtattggtgaatttt

SEQ ID NO: 1111 - DNA, 21 bp, synthetic construct
  misc_feature 1..21: note = Description of Artificial Sequence: Synthetic oligonucleotide
  source 1..21: mol_type = other DNA
  misc_feature 1..19: note = RNA
  misc_feature 20..21: note = DNA
aattcaccaatacctattctt

SEQ ID NO: 1112 - DNA, 21 bp, synthetic construct
  misc_feature 1..21: note = Description of Artificial Sequence: Synthetic oligonucleotide
  source 1..21: mol_type = other DNA
  misc_feature 1..19: note = RNA
  misc_feature 20..21: note = DNA
aataggtattggtgaattttt

SEQ ID NO: 1113 - DNA, 21 bp, synthetic construct
  misc_feature 1..21: note = Description of Artificial Sequence: Synthetic oligonucleotide
  source 1..21: mol_type = other DNA
  misc_feature 1..19: note = RNA
  misc_feature 20..21: note = DNA
aaattcaccaatacctatttt

SEQ ID NO: 1114 - DNA, 21 bp, synthetic construct
  misc_feature 1..21: note = Description of Artificial Sequence: Synthetic oligonucleotide
  source 1..21: mol_type = other DNA
  misc_feature 1..19: note = RNA
  misc_feature 20..21: note = DNA
ataggtattggtgaatttatt

SEQ ID NO: 1115 - DNA, 21 bp, synthetic construct
  misc_feature 1..21: note = Description of Artificial Sequence: Synthetic oligonucleotide
  source 1..21: mol_type = other DNA
  misc_feature 1..19: note = RNA
  misc_feature 20..21: note = DNA
taaattcaccaatacctattt

SEQ ID NO: 1116 - DNA, 21 bp, synthetic construct
  misc_feature 1..21: note = Description of Artificial Sequence: Synthetic oligonucleotide
  source 1..21: mol_type = other DNA
  misc_feature 1..19: note = RNA
  misc_feature 20..21: note = DNA
aggtattggtgaatttaaatt

SEQ ID NO: 1117 - DNA, 21 bp, synthetic construct
  misc_feature 1..21: note = Description of Artificial Sequence: Synthetic oligonucleotide
  source 1..21: mol_type = other DNA
  misc_feature 1..19: note = RNA
  misc_feature 20..21: note = DNA
tttaaattcaccaataccttt

SEQ ID NO: 1118 - DNA, 21 bp, synthetic construct
  misc_feature 1..21: note = Description of Artificial Sequence: Synthetic oligonucleotide
  source 1..21: mol_type = other DNA
  misc_feature 1..19: note = RNA
  misc_feature 20..21: note = DNA
ggtattggtgaatttaaagtt

SEQ ID NO: 1119 - DNA, 21 bp, synthetic construct
  misc_feature 1..21: note = Description of Artificial Sequence: Synthetic oligonucleotide
  source 1..21: mol_type = other DNA
  misc_feature 1..19: note = RNA
  misc_feature 20..21: note = DNA
ctttaaattcaccaatacctt

SEQ ID NO: 1120 - DNA, 21 bp, synthetic construct
  misc_feature 1..21: note = Description of Artificial Sequence: Synthetic oligonucleotide
  source 1..21: mol_type = other DNA
  misc_feature 1..19: note = RNA
  misc_feature 20..21: note = DNA
cactctccataaatgctactt

SEQ ID NO: 1121 - DNA, 21 bp, synthetic construct
  misc_feature 1..21: note = Description of Artificial Sequence: Synthetic oligonucleotide
  source 1..21: mol_type = other DNA
  misc_feature 1..19: note = RNA
  misc_feature 20..21: note = DNA
gtagcatttatggagagtgtt

SEQ ID NO: 1122 - DNA, 21 bp, synthetic construct
  misc_feature 1..21: note = Description of Artificial Sequence: Synthetic oligonucleotide
  source 1..21: mol_type = other DNA
  misc_feature 1..19: note = RNA
  misc_feature 20..21: note = DNA
ttaaacacttcaaaaactgtt

SEQ ID NO: 1123 - DNA, 21 bp, synthetic construct
  misc_feature 1..21: note = Description of Artificial Sequence: Synthetic oligonucleotide
  source 1..21: mol_type = other DNA
  misc_feature 1..19: note = RNA
  misc_feature 20..21: note = DNA
cagtttttgaagtgtttaatt

SEQ ID NO: 1124 - DNA, 21 bp, synthetic construct
  misc_feature 1..21: note = Description of Artificial Sequence: Synthetic oligonucleotide
  source 1..21: mol_type = other DNA
  misc_feature 1..19: note = RNA
  misc_feature 20..21: note = DNA
cttcaaaaactgcacctcctt

SEQ ID NO: 1125 - DNA, 21 bp, synthetic construct
  misc_feature 1..21: note = Description of Artificial Sequence: Synthetic oligonucleotide
  source 1..21: mol_type = other DNA
  misc_feature 1..19: note = RNA
  misc_feature 20..21: note = DNA
ggaggtgcagtttttgaagtt

SEQ ID NO: 1126 - DNA, 21 bp, synthetic construct
  misc_feature 1..21: note = Description of Artificial Sequence: Synthetic oligonucleotide
  source 1..21: mol_type = other DNA
  misc_feature 1..19: note = RNA
  misc_feature 20..21: note = DNA
ttcaaaaactgcacctccatt

SEQ ID NO: 1127 - DNA, 21 bp, synthetic construct
  misc_feature 1..21: note = Description of Artificial Sequence: Synthetic oligonucleotide
  source 1..21: mol_type = other DNA
  misc_feature 1..19: note = RNA
  misc_feature 20..21: note = DNA
tggaggtgcagtttttgaatt

SEQ ID NO: 1128 - DNA, 21 bp, synthetic construct
  misc_feature 1..21: note = Description of Artificial Sequence: Synthetic oligonucleotide
  source 1..21: mol_type = other DNA
  misc_feature 1..19: note = RNA
  misc_feature 20..21: note = DNA
tcaaaaactgcacctccattt

SEQ ID NO: 1129 - DNA, 21 bp, synthetic construct
  misc_feature 1..21: note = Description of Artificial Sequence: Synthetic oligonucleotide
  source 1..21: mol_type = other DNA
  misc_feature 1..19: note = RNA
  misc_feature 20..21: note = DNA
atggaggtgcagtttttgatt

SEQ ID NO: 1130 - DNA, 21 bp, synthetic construct
  misc_feature 1..21: note = Description of Artificial Sequence: Synthetic oligonucleotide
  source 1..21: mol_type = other DNA
  misc_feature 1..19: note = RNA
  misc_feature 20..21: note = DNA
caaaaactgcacctccatctt

SEQ ID NO: 1131 - DNA, 21 bp, synthetic construct
  misc_feature 1..21: note = Description of Artificial Sequence: Synthetic oligonucleotide
  source 1..21: mol_type = other DNA
  misc_feature 1..19: note = RNA
  misc_feature 20..21: note = DNA
gatggaggtgcagtttttgtt

SEQ ID NO: 1132 - DNA, 21 bp, synthetic construct
  misc_feature 1..21: note = Description of Artificial Sequence: Synthetic oligonucleotide
  source 1..21: mol_type = other DNA
  misc_feature 1..19: note = RNA
  misc_feature 20..21: note = DNA
aaaaactgcacctccatcatt

SEQ ID NO: 1133 - DNA, 21 bp, synthetic construct
  misc_feature 1..21: note = Description of Artificial Sequence: Synthetic oligonucleotide
  source 1..21: mol_type = other DNA
  misc_feature 1..19: note = RNA
  misc_feature 20..21: note = DNA
tgatggaggtgcagttttttt

SEQ ID NO: 1134 - DNA, 21 bp, synthetic construct
  misc_feature 1..21: note = Description of Artificial Sequence: Synthetic oligonucleotide
  source 1..21: mol_type = other DNA
  misc_feature 1..19: note = RNA
  misc_feature 20..21: note = DNA
actgcacctccatcagtggtt

SEQ ID NO: 1135 - DNA, 21 bp, synthetic construct
  misc_feature 1..21: note = Description of Artificial Sequence: Synthetic oligonucleotide
  source 1..21: mol_type = other DNA
  misc_feature 1..19: note = RNA
  misc_feature 20..21: note = DNA
ccactgatggaggtgcagttt

SEQ ID NO: 1136 - DNA, 21 bp, synthetic construct
  misc_feature 1..21: note = Description of Artificial Sequence: Synthetic oligonucleotide
  source 1..21: mol_type = other DNA
  misc_feature 1..19: note = RNA
  misc_feature 20..21: note = DNA
cacctccatcagtggcgattt

SEQ ID NO: 1137 - DNA, 21 bp, synthetic construct
  misc_feature 1..21: note = Description of Artificial Sequence: Synthetic oligonucleotide
  source 1..21: mol_type = other DNA
  misc_feature 1..19: note = RNA
  misc_feature 20..21: note = DNA
atcgccactgatggaggtgtt

SEQ ID NO: 1138 - DNA, 21 bp, synthetic construct
  misc_feature 1..21: note = Description of Artificial Sequence: Synthetic oligonucleotide
  source 1..21: mol_type = other DNA
  misc_feature 1..19: note = RNA
  misc_feature 20..21: note = DNA
acctccatcagtggcgatctt

SEQ ID NO: 1139 - DNA, 21 bp, synthetic construct
  misc_feature 1..21: note = Description of Artificial Sequence: Synthetic oligonucleotide
  source 1..21: mol_type = other DNA
  misc_feature 1..19: note = RNA
  misc_feature 20..21: note = DNA
gatcgccactgatggaggttt

SEQ ID NO: 1140 - DNA, 21 bp, synthetic construct
  misc_feature 1..21: note = Description of Artificial Sequence: Synthetic oligonucleotide
  source 1..21: mol_type = other DNA
  misc_feature 1..19: note = RNA
  misc_feature 20..21: note = DNA
ctccatcagtggcgatctctt

SEQ ID NO: 1141 - DNA, 21 bp, synthetic construct
  misc_feature 1..21: note = Description of Artificial Sequence: Synthetic oligonucleotide
  source 1..21: mol_type = other DNA
  misc_feature 1..19: note = RNA
  misc_feature 20..21: note = DNA
gagatcgccactgatggagtt

SEQ ID NO: 1142 - DNA, 21 bp, synthetic construct
  misc_feature 1..21: note = Description of Artificial Sequence: Synthetic oligonucleotide
  source 1..21: mol_type = other DNA
  misc_feature 1..19: note = RNA
  misc_feature 20..21: note = DNA
catcagtggcgatctccactt

SEQ ID NO: 1143 - DNA, 21 bp, synthetic construct
  misc_feature 1..21: note = Description of Artificial Sequence: Synthetic oligonucleotide
  source 1..21: mol_type = other DNA
  misc_feature 1..19: note = RNA
  misc_feature 20..21: note = DNA
gtggagatcgccactgatgtt

SEQ ID NO: 1144 - DNA, 21 bp, synthetic construct
  misc_feature 1..21: note = Description of Artificial Sequence: Synthetic oligonucleotide
  source 1..21: mol_type = other DNA
  misc_feature 1..19: note = RNA
  misc_feature 20..21: note = DNA
tggcgatctccacatcctgtt

SEQ ID NO: 1145 - DNA, 21 bp, synthetic construct
  misc_feature 1..21: note = Description of Artificial Sequence: Synthetic oligonucleotide
  source 1..21: mol_type = other DNA
  misc_feature 1..19: note = RNA
  misc_feature 20..21: note = DNA
caggatgtggagatcgccatt

SEQ ID NO: 1146 - DNA, 21 bp, synthetic construct
  misc_feature 1..21: note = Description of Artificial Sequence: Synthetic oligonucleotide
  source 1..21: mol_type = other DNA
  misc_feature 1..19: note = RNA
  misc_feature 20..21: note = DNA
ggcgatctccacatcctgctt

SEQ ID NO: 1147 - DNA, 21 bp, synthetic construct
  misc_feature 1..21: note = Description of Artificial Sequence: Synthetic oligonucleotide
  source 1..21: mol_type = other DNA
  misc_feature 1..19: note = RNA
  misc_feature 20..21: note = DNA
gcaggatgtggagatcgcctt

SEQ ID NO: 1148 - DNA, 21 bp, synthetic construct
  misc_feature 1..21: note = Description of Artificial Sequence: Synthetic oligonucleotide
  source 1..21: mol_type = other DNA
  misc_feature 1..19: note = RNA
  misc_feature 20..21: note = DNA
gcgatctccacatcctgcctt

SEQ ID NO: 1149 - DNA, 21 bp, synthetic construct
  misc_feature 1..21: note = Description of Artificial Sequence: Synthetic oligonucleotide
  source 1..21: mol_type = other DNA
  misc_feature 1..19: note = RNA
  misc_feature 20..21: note = DNA
ggcaggatgtggagatcgctt

SEQ ID NO: 1150 - DNA, 21 bp, synthetic construct
  misc_feature 1..21: note = Description of Artificial Sequence: Synthetic oligonucleotide
  source 1..21: mol_type = other DNA
  misc_feature 1..19: note = RNA
  misc_feature 20..21: note = DNA
cgatctccacatcctgccgtt

SEQ ID NO: 1151 - DNA, 21 bp, synthetic construct
  misc_feature 1..21: note = Description of Artificial Sequence: Synthetic oligonucleotide
  source 1..21: mol_type = other DNA
  misc_feature 1..19: note = RNA
  misc_feature 20..21: note = DNA
cggcaggatgtggagatcgtt

SEQ ID NO: 1152 - DNA, 21 bp, synthetic construct
  misc_feature 1..21: note = Description of Artificial Sequence: Synthetic oligonucleotide
  source 1..21: mol_type = other DNA
  misc_feature 1..19: note = RNA
  misc_feature 20..21: note = DNA
gatctccacatcctgccggtt

SEQ ID NO: 1153 - DNA, 21 bp, synthetic construct
  misc_feature 1..21: note = Description of Artificial Sequence: Synthetic oligonucleotide
  source 1..21: mol_type = other DNA
  misc_feature 1..19: note = RNA
  misc_feature 20..21: note = DNA
ccggcaggatgtggagatctt

SEQ ID NO: 1154 - DNA, 21 bp, synthetic construct
  misc_feature 1..21: note = Description of Artificial Sequence: Synthetic oligonucleotide
  source 1..21: mol_type = other DNA
  misc_feature 1..19: note = RNA
  misc_feature 20..21: note = DNA
ccacatcctgccggtggcatt

SEQ ID NO: 1155 - DNA, 21 bp, synthetic construct
  misc_feature 1..21: note = Description of Artificial Sequence: Synthetic oligonucleotide
  source 1..21: mol_type = other DNA
  misc_feature 1..19: note = RNA
  misc_feature 20..21: note = DNA
tgccaccggcaggatgtggtt

SEQ ID NO: 1156 - DNA, 21 bp, synthetic construct
  misc_feature 1..21: note = Description of Artificial Sequence: Synthetic oligonucleotide
  source 1..21: mol_type = other DNA
  misc_feature 1..19: note = RNA
  misc_feature 20..21: note = DNA
cacatcctgccggtggcattt

SEQ ID NO: 1157 - DNA, 21 bp, synthetic construct
  misc_feature 1..21: note = Description of Artificial Sequence: Synthetic oligonucleotide
  source 1..21: mol_type = other DNA
  misc_feature 1..19: note = RNA
  misc_feature 20..21: note = DNA
atgccaccggcaggatgtgtt

SEQ ID NO: 1158 - DNA, 21 bp, synthetic construct
  misc_feature 1..21: note = Description of Artificial Sequence: Synthetic oligonucleotide
  source 1..21: mol_type = other DNA
  misc_feature 1..19: note = RNA
  misc_feature 20..21: note = DNA
acatcctgccggtggcatttt

SEQ ID NO: 1159 - DNA, 21 bp, synthetic construct
  misc_feature 1..21: note = Description of Artificial Sequence: Synthetic oligonucleotide
  source 1..21: mol_type = other DNA
  misc_feature 1..19: note = RNA
  misc_feature 20..21: note = DNA
aatgccaccggcaggatgttt

SEQ ID NO: 1160 - DNA, 21 bp, synthetic construct
  misc_feature 1..21: note = Description of Artificial Sequence: Synthetic oligonucleotide
  source 1..21: mol_type = other DNA
  misc_feature 1..19: note = RNA
  misc_feature 20..21: note = DNA
atcctgccggtggcatttatt

SEQ ID NO: 1161 - DNA, 21 bp, synthetic construct
  misc_feature 1..21: note = Description of Artificial Sequence: Synthetic oligonucleotide
  source 1..21: mol_type = other DNA
  misc_feature 1..19: note = RNA
  misc_feature 20..21: note = DNA
taaatgccaccggcaggattt

SEQ ID NO: 1162 - DNA, 21 bp, synthetic construct
  misc_feature 1..21: note = Description of Artificial Sequence: Synthetic oligonucleotide
  source 1..21: mol_type = other DNA
  misc_feature 1..19: note = RNA
  misc_feature 20..21: note = DNA
ctgccggtggcatttagggtt

SEQ ID NO: 1163 - DNA, 21 bp, synthetic construct
  misc_feature 1..21: note = Description of Artificial Sequence: Synthetic oligonucleotide
  source 1..21: mol_type = other DNA
  misc_feature 1..19: note = RNA
  misc_feature 20..21: note = DNA
ccctaaatgccaccggcagtt

SEQ ID NO: 1164 - DNA, 21 bp, synthetic construct
  misc_feature 1..21: note = Description of Artificial Sequence: Synthetic oligonucleotide
  source 1..21: mol_type = other DNA
  misc_feature 1..19: note = RNA
  misc_feature 20..21: note = DNA
tgccggtggcatttaggggtt

SEQ ID NO: 1165 - DNA, 21 bp, synthetic construct
  misc_feature 1..21: note = Description of Artificial Sequence: Synthetic oligonucleotide
  source 1..21: mol_type = other DNA
  misc_feature 1..19: note = RNA
  misc_feature 20..21: note = DNA
cccctaaatgccaccggcatt

SEQ ID NO: 1166 - DNA, 21 bp, synthetic construct
  misc_feature 1..21: note = Description of Artificial Sequence: Synthetic oligonucleotide
  source 1..21: mol_type = other DNA
  misc_feature 1..19: note = RNA
  misc_feature 20..21: note = DNA
gccggtggcatttaggggttt

SEQ ID NO: 1167 - DNA, 21 bp, synthetic construct
  misc_feature 1..21: note = Description of Artificial Sequence: Synthetic oligonucleotide
  source 1..21: mol_type = other DNA
  misc_feature 1..19: note = RNA
  misc_feature 20..21: note = DNA
acccctaaatgccaccggctt

SEQ ID NO: 1168 - DNA, 21 bp, synthetic construct
  misc_feature 1..21: note = Description of Artificial Sequence: Synthetic oligonucleotide
  source 1..21: mol_type = other DNA
  misc_feature 1..19: note = RNA
  misc_feature 20..21: note = DNA
ccggtggcatttaggggtgtt

SEQ ID NO: 1169 - DNA, 21 bp, synthetic construct
  misc_feature 1..21: note = Description of Artificial Sequence: Synthetic oligonucleotide
  source 1..21: mol_type = other DNA
  misc_feature 1..19: note = RNA
  misc_feature 20..21: note = DNA
cacccctaaatgccaccggtt

SEQ ID NO: 1170 - DNA, 21 bp, synthetic construct
  misc_feature 1..21: note = Description of Artificial Sequence: Synthetic oligonucleotide
  source 1..21: mol_type = other DNA
  misc_feature 1..19: note = RNA
  misc_feature 20..21: note = DNA
gtggcatttaggggtgacttt

SEQ ID NO: 1171 - DNA, 21 bp, synthetic construct
  misc_feature 1..21: note = Description of Artificial Sequence: Synthetic oligonucleotide
  source 1..21: mol_type = other DNA
  misc_feature 1..19: note = RNA
  misc_feature 20..21: note = DNA
agtcacccctaaatgccactt

SEQ ID NO: 1172 - DNA, 21 bp, synthetic construct
  misc_feature 1..21: note = Description of Artificial Sequence: Synthetic oligonucleotide
  source 1..21: mol_type = other DNA
  misc_feature 1..19: note = RNA
  misc_feature 20..21: note = DNA
gcatttaggggtgactccttt

SEQ ID NO: 1173 - DNA, 21 bp, synthetic construct
  misc_feature 1..21: note = Description of Artificial Sequence: Synthetic oligonucleotide
  source 1..21: mol_type = other DNA
  misc_feature 1..19: note = RNA
  misc_feature 20..21: note = DNA
aggagtcacccctaaatgctt

SEQ ID NO: 1174 - DNA, 21 bp, synthetic construct
  misc_feature 1..21: note = Description of Artificial Sequence: Synthetic oligonucleotide
  source 1..21: mol_type = other DNA
  misc_feature 1..19: note = RNA
  misc_feature 20..21: note = DNA
catttaggggtgactcctttt

SEQ ID NO: 1175 - DNA, 21 bp, synthetic construct
  misc_feature 1..21: note = Description of Artificial Sequence: Synthetic oligonucleotide
  source 1..21: mol_type = other DNA
  misc_feature 1..19: note = RNA
  misc_feature 20..21: note = DNA
aaggagtcacccctaaatgtt

SEQ ID NO: 1176 - DNA, 21 bp, synthetic construct
  misc_feature 1..21: note = Description of Artificial Sequence: Synthetic oligonucleotide
  source 1..21: mol_type = other DNA
  misc_feature 1..19: note = RNA
  misc_feature 20..21: note = DNA
atttaggggtgactccttctt

SEQ ID NO: 1177 - DNA, 21 bp, synthetic construct
  misc_feature 1..21: note = Description of Artificial Sequence: Synthetic oligonucleotide
  source 1..21: mol_type = other DNA
  misc_feature 1..19: note = RNA
  misc_feature 20..21: note = DNA
gaaggagtcacccctaaattt

SEQ ID NO: 1178 - DNA, 21 bp, synthetic construct
  misc_feature 1..21: note = Description of Artificial Sequence: Synthetic oligonucleotide
  source 1..21: mol_type = other DNA
  misc_feature 1..19: note = RNA
  misc_feature 20..21: note = DNA
tttaggggtgactccttcatt

SEQ ID NO: 1179 - DNA, 21 bp, synthetic construct
  misc_feature 1..21: note = Description of Artificial Sequence: Synthetic oligonucleotide
  source 1..21: mol_type = other DNA
  misc_feature 1..19: note = RNA
  misc_feature 20..21: note = DNA
tgaaggagtcacccctaaatt

SEQ ID NO: 1180 - DNA, 21 bp, synthetic construct
  misc_feature 1..21: note = Description of Artificial Sequence: Synthetic oligonucleotide
  source 1..21: mol_type = other DNA
  misc_feature 1..19: note = RNA
  misc_feature 20..21: note = DNA
ttaggggtgactccttcactt

SEQ ID NO: 1181 - DNA, 21 bp, synthetic construct
  misc_feature 1..21: note = Description of Artificial Sequence: Synthetic oligonucleotide
  source 1..21: mol_type = other DNA
  misc_feature 1..19: note = RNA
  misc_feature 20..21: note = DNA
gtgaaggagtcacccctaatt

SEQ ID NO: 1182 - DNA, 21 bp, synthetic construct
  misc_feature 1..21: note = Description of Artificial Sequence: Synthetic oligonucleotide
  source 1..21: mol_type = other DNA
  misc_feature 1..19: note = RNA
  misc_feature 20..21: note = DNA
taggggtgactccttcacatt

SEQ ID NO: 1183 - DNA, 21 bp, synthetic construct
  misc_feature 1..21: note = Description of Artificial Sequence: Synthetic oligonucleotide
  source 1..21: mol_type = other DNA
  misc_feature 1..19: note = RNA
  misc_feature 20..21: note = DNA
tgtgaaggagtcacccctatt

SEQ ID NO: 1184 - DNA, 21 bp, synthetic construct
  misc_feature 1..21: note = Description of Artificial Sequence: Synthetic oligonucleotide
  source 1..21: mol_type = other DNA
  misc_feature 1..19: note = RNA
  misc_feature 20..21: note = DNA
tctggatccacaggaactgtt

SEQ ID NO: 1185 - DNA, 21 bp, synthetic construct
  misc_feature 1..21: note = Description of Artificial Sequence: Synthetic oligonucleotide
  source 1..21: mol_type = other DNA
  misc_feature 1..19: note = RNA
  misc_feature 20..21: note = DNA
cagttcctgtggatccagatt

SEQ ID NO: 1186 - DNA, 21 bp, synthetic construct
  misc_feature 1..21: note = Description of Artificial Sequence: Synthetic oligonucleotide
  source 1..21: mol_type = other DNA
  misc_feature 1..19: note = RNA
  misc_feature 20..21: note = DNA
gatccacaggaactggatatt

SEQ ID NO: 1187 - DNA, 21 bp, synthetic construct
  misc_feature 1..21: note = Description of Artificial Sequence: Synthetic oligonucleotide
  source 1..21: mol_type = other DNA
  misc_feature 1..19: note = RNA
  misc_feature 20..21: note = DNA
tatccagttcctgtggatctt

SEQ ID NO: 1188 - DNA, 21 bp, synthetic construct
  misc_feature 1..21: note = Description of Artificial Sequence: Synthetic oligonucleotide
  source 1..21: mol_type = other DNA
  misc_feature 1..19: note = RNA
  misc_feature 20..21: note = DNA
atccacaggaactggatattt

SEQ ID NO: 1189 - DNA, 21 bp, synthetic construct
  misc_feature 1..21: note = Description of Artificial Sequence: Synthetic oligonucleotide
  source 1..21: mol_type = other DNA
  misc_feature 1..19: note = RNA
  misc_feature 20..21: note = DNA
atatccagttcctgtggattt

SEQ ID NO: 1190 - DNA, 21 bp, synthetic construct
  misc_feature 1..21: note = Description of Artificial Sequence: Synthetic oligonucleotide
  source 1..21: mol_type = other DNA
  misc_feature 1..19: note = RNA
  misc_feature 20..21: note = DNA
ccacaggaactggatattctt

SEQ ID NO: 1191 - DNA, 21 bp, synthetic construct
  misc_feature 1..21: note = Description of Artificial Sequence: Synthetic oligonucleotide
  source 1..21: mol_type = other DNA
  misc_feature 1..19: note = RNA
  misc_feature 20..21: note = DNA
gaatatccagttcctgtggtt

SEQ ID NO: 1192 - DNA, 21 bp, synthetic construct
  misc_feature 1..21: note = Description of Artificial Sequence: Synthetic oligonucleotide
  source 1..21: mol_type = other DNA
  misc_feature 1..19: note = RNA
  misc_feature 20..21: note = DNA
cacaggaactggatattcttt

SEQ ID NO: 1193 - DNA, 21 bp, synthetic construct
  misc_feature 1..21: note = Description of Artificial Sequence: Synthetic oligonucleotide
  source 1..21: mol_type = other DNA
  misc_feature 1..19: note = RNA
  misc_feature 20..21: note = DNA
agaatatccagttcctgtgtt

SEQ ID NO: 1194 - DNA, 21 bp, synthetic construct
  misc_feature 1..21: note = Description of Artificial Sequence: Synthetic oligonucleotide
  source 1..21: mol_type = other DNA
  misc_feature 1..19: note = RNA
  misc_feature 20..21: note = DNA
actggatattctgaaaacctt

SEQ ID NO: 1195 - DNA, 21 bp, synthetic construct
  misc_feature 1..21: note = Description of Artificial Sequence: Synthetic oligonucleotide
  source 1..21: mol_type = other DNA
  misc_feature 1..19: note = RNA
  misc_feature 20..21: note = DNA
ggttttcagaatatccagttt

SEQ ID NO: 1196 - DNA, 21 bp, synthetic construct
  misc_feature 1..21: note = Description of Artificial Sequence: Synthetic oligonucleotide
  source 1..21: mol_type = other DNA
  misc_feature 1..19: note = RNA
  misc_feature 20..21: note = DNA
attctgaaaaccgtaaaggtt

SEQ ID NO: 1197 - DNA, 21 bp, synthetic construct
  misc_feature 1..21: note = Description of Artificial Sequence: Synthetic oligonucleotide
  source 1..21: mol_type = other DNA
  misc_feature 1..19: note = RNA
  misc_feature 20..21: note = DNA
cctttacggttttcagaattt

SEQ ID NO: 1198 - DNA, 21 bp, synthetic construct
  misc_feature 1..21: note = Description of Artificial Sequence: Synthetic oligonucleotide
  source 1..21: mol_type = other DNA
  misc_feature 1..19: note = RNA
  misc_feature 20..21: note = DNA
ttctgaaaaccgtaaaggatt

SEQ ID NO: 1199 - DNA, 21 bp, synthetic construct
  misc_feature 1..21: note = Description of Artificial Sequence: Synthetic oligonucleotide
  source 1..21: mol_type = other DNA
  misc_feature 1..19: note = RNA
  misc_feature 20..21: note = DNA
tcctttacggttttcagaatt

SEQ ID NO: 1200 - DNA, 21 bp, synthetic construct
  misc_feature 1..21: note = Description of Artificial Sequence: Synthetic oligonucleotide
  source 1..21: mol_type = other DNA
  misc_feature 1..19: note = RNA
  misc_feature 20..21: note = DNA
tgaaaaccgtaaaggaaattt

SEQ ID NO: 1201 - DNA, 21 bp, synthetic construct
  misc_feature 1..21: note = Description of Artificial Sequence: Synthetic oligonucleotide
  source 1..21: mol_type = other DNA
  misc_feature 1..19: note = RNA
  misc_feature 20..21: note = DNA
atttcctttacggttttcatt

SEQ ID NO: 1202 - DNA, 21 bp, synthetic construct
  misc_feature 1..21: note = Description of Artificial Sequence: Synthetic oligonucleotide
  source 1..21: mol_type = other DNA
  misc_feature 1..19: note = RNA
  misc_feature 20..21: note = DNA
gaaaaccgtaaaggaaatctt

SEQ ID NO: 1203 - DNA, 21 bp, synthetic construct
  misc_feature 1..21: note = Description of Artificial Sequence: Synthetic oligonucleotide
  source 1..21: mol_type = other DNA
  misc_feature 1..19: note = RNA
  misc_feature 20..21: note = DNA
gatttcctttacggttttctt

SEQ ID NO: 1204 - DNA, 21 bp, synthetic construct
  misc_feature 1..21: note = Description of Artificial Sequence: Synthetic oligonucleotide
  source 1..21: mol_type = other DNA
  modified_base 1: mod_base = OTHER; note = 2'-O-Methyl nucleotide
  modified_base 2: mod_base = OTHER; note = 2'-O-Methyl nucleotide
  modified_base 3: mod_base = OTHER; note = 2'-fluoro nucleotide
  modified_base 4: mod_base = OTHER; note = 2'-O-Methyl nucleotide
  modified_base 5: mod_base = OTHER; note = 2'-fluoro nucleotide
  modified_base 6: mod_base = OTHER; note = 2'-O-Methyl nucleotide
  modified_base 7: mod_base = OTHER; note = 2'-fluoro nucleotide
  modified_base 8: mod_base = OTHER; note = 2'-O-Methyl nucleotide
  modified_base 9: mod_base = OTHER; note = 2'-fluoro nucleotide
  modified_base 10: mod_base = OTHER; note = 2'-O-Methyl nucleotide
  modified_base 11: mod_base = OTHER; note = 2'-fluoro nucleotide
  modified_base 12: mod_base = OTHER; note = 2'-O-Methyl nucleotide
  modified_base 13: mod_base = OTHER; note = 2'-fluoro nucleotide
  modified_base 14: mod_base = OTHER; note = 2'-O-Methyl nucleotide
  modified_base 15: mod_base = OTHER; note = 2'-fluoro nucleotide
  modified_base 16: mod_base = OTHER; note = 2'-O-Methyl nucleotide
  modified_base 17: mod_base = OTHER; note = 2'-fluoro nucleotide
  modified_base 18: mod_base = OTHER; note = 2'-O-Methyl nucleotide
  modified_base 19: mod_base = OTHER; note = 2'-fluoro nucleotide
  modified_base 20: mod_base = OTHER; note = deoxy-thymine phosphorothioate
  misc_feature 1..19: note = RNA
  misc_feature 20..21: note = DNA
cggccggagtcccgagctatt

SEQ ID NO: 1205 - DNA, 21 bp, synthetic construct
  misc_feature 1..21: note = Description of Artificial Sequence: Synthetic oligonucleotide
  source 1..21: mol_type = other DNA
  modified_base 1: mod_base = OTHER; note = 2'-fluoro nucleotide
  modified_base 2: mod_base = OTHER; note = 2'-fluoro nucleotide
  modified_base 3: mod_base = OTHER; note = 2'-O-Methyl nucleotide
  modified_base 4: mod_base = OTHER; note = 2'-fluoro nucleotide
  modified_base 5: mod_base = OTHER; note = 2'-O-Methyl nucleotide
  modified_base 6: mod_base = OTHER; note = 2'-fluoro nucleotide
  modified_base 7: mod_base = OTHER; note = 2'-O-Methyl nucleotide
  modified_base 8: mod_base = OTHER; note = 2'-fluoro nucleotide
  modified_base 9: mod_base = OTHER; note = 2'-O-Methyl nucleotide
  modified_base 10: mod_base = OTHER; note = 2'-fluoro nucleotide
  modified_base 11: mod_base = OTHER; note = 2'-O-Methyl nucleotide
  modified_base 12: mod_base = OTHER; note = 2'-fluoro nucleotide
  modified_base 13: mod_base = OTHER; note = 2'-O-Methyl nucleotide
  modified_base 14: mod_base = OTHER; note = 2'-fluoro nucleotide
  modified_base 15: mod_base = OTHER; note = 2'-O-Methyl nucleotide
  modified_base 16: mod_base = OTHER; note = 2'-fluoro nucleotide
  modified_base 17: mod_base = OTHER; note = 2'-O-Methyl nucleotide
  modified_base 18: mod_base = OTHER; note = 2'-fluoro nucleotide
  modified_base 19: mod_base = OTHER; note = 2'-O-Methyl nucleotide
  modified_base 20: mod_base = OTHER; note = deoxy-thymine phosphorothioate
  misc_feature 1..19: note = RNA
  misc_feature 20..21: note = DNA
tagctcgggactccggccgtt

SEQ ID NO: 1206 - DNA, 21 bp, synthetic construct
  misc_feature 1..21: note = Description of Artificial Sequence: Synthetic oligonucleotide
  source 1..21: mol_type = other DNA
  modified_base 1: mod_base = OTHER; note = 2'-O-Methyl nucleotide
  modified_base 2: mod_base = OTHER; note = 2'-O-Methyl nucleotide
  modified_base 3: mod_base = OTHER; note = 2'-fluoro nucleotide
  modified_base 4: mod_base = OTHER; note = 2'-O-Methyl nucleotide
  modified_base 5: mod_base = OTHER; note = 2'-fluoro nucleotide
  modified_base 6: mod_base = OTHER; note = 2'-O-Methyl nucleotide
  modified_base 7: mod_base = OTHER; note = 2'-fluoro nucleotide
  modified_base 8: mod_base = OTHER; note = 2'-O-Methyl nucleotide
  modified_base 9: mod_base = OTHER; note = 2'-fluoro nucleotide
  modified_base 10: mod_base = OTHER; note = 2'-O-Methyl nucleotide
  modified_base 11: mod_base = OTHER; note = 2'-fluoro nucleotide
  modified_base 12: mod_base = OTHER; note = 2'-O-Methyl nucleotide
  modified_base 13: mod_base = OTHER; note = 2'-fluoro nucleotide
  modified_base 14: mod_base = OTHER; note = 2'-O-Methyl nucleotide
  modified_base 15: mod_base = OTHER; note = 2'-fluoro nucleotide
  modified_base 16: mod_base = OTHER; note = 2'-O-Methyl nucleotide
  modified_base 17: mod_base = OTHER; note = 2'-fluoro nucleotide
  modified_base 18: mod_base = OTHER; note = 2'-O-Methyl nucleotide
  modified_base 19: mod_base = OTHER; note = 2'-fluoro nucleotide
  modified_base 20: mod_base = OTHER; note = deoxy-thymine phosphorothioate
  misc_feature 1..19: note = RNA
  misc_feature 20..21: note = DNA
ccggagtcccgagctagcctt

SEQ ID NO: 1207 - DNA, 21 bp, synthetic construct
  misc_feature 1..21: note = Description of Artificial Sequence: Synthetic oligonucleotide
  source 1..21: mol_type = other DNA
  modified_base 1: mod_base = OTHER; note = 2'-fluoro nucleotide
  modified_base 2: mod_base = OTHER; note = 2'-fluoro nucleotide
  modified_base 3: mod_base = OTHER; note = 2'-O-Methyl nucleotide
  modified_base 4: mod_base = OTHER; note = 2'-fluoro nucleotide
  modified_base 5: mod_base = OTHER; note = 2'-O-Methyl nucleotide
  modified_base 6: mod_base = OTHER; note = 2'-fluoro nucleotide
  modified_base 7: mod_base = OTHER; note = 2'-O-Methyl nucleotide
  modified_base 8: mod_base = OTHER; note = 2'-fluoro nucleotide
  modified_base 9: mod_base = OTHER; note = 2'-O-Methyl nucleotide
  modified_base 10: mod_base = OTHER; note = 2'-fluoro nucleotide
  modified_base 11: mod_base = OTHER; note = 2'-O-Methyl nucleotide
  modified_base 12: mod_base = OTHER; note = 2'-fluoro nucleotide
  modified_base 13: mod_base = OTHER; note = 2'-O-Methyl nucleotide
  modified_base 14: mod_base = OTHER; note = 2'-fluoro nucleotide
  modified_base 15: mod_base = OTHER; note = 2'-O-Methyl nucleotide
  modified_base 16: mod_base = OTHER; note = 2'-fluoro nucleotide
  modified_base 17: mod_base = OTHER; note = 2'-O-Methyl nucleotide
  modified_base 18: mod_base = OTHER; note = 2'-fluoro nucleotide
  modified_base 19: mod_base = OTHER; note = 2'-O-Methyl nucleotide
  modified_base 20: mod_base = OTHER; note = deoxy-thymine phosphorothioate
  misc_feature 1..19: note = RNA
  misc_feature 20..21: note = DNA
ggctagctcgggactccggtt

SEQ ID NO: 1208 - DNA, 21 bp, synthetic construct
  misc_feature 1..21: note = Description of Artificial Sequence: Synthetic oligonucleotide
  source 1..21: mol_type = other DNA
  modified_base 1: mod_base = OTHER; note = 2'-O-Methyl nucleotide
  modified_base 2: mod_base = OTHER; note = 2'-O-Methyl nucleotide
  modified_base 3: mod_base = OTHER; note = 2'-fluoro nucleotide
  modified_base 4: mod_base = OTHER; note = 2'-O-Methyl nucleotide
  modified_base 5: mod_base = OTHER; note = 2'-fluoro nucleotide
  modified_base 6: mod_base = OTHER; note = 2'-O-Methyl nucleotide
  modified_base 7: mod_base = OTHER; note = 2'-fluoro nucleotide
  modified_base 8: mod_base = OTHER; note = 2'-O-Methyl nucleotide
  modified_base 9: mod_base = OTHER; note = 2'-fluoro nucleotide
  modified_base 10: mod_base = OTHER; note = 2'-O-Methyl nucleotide
  modified_base 11: mod_base = OTHER; note = 2'-fluoro nucleotide
  modified_base 12: mod_base = OTHER; note = 2'-O-Methyl nucleotide
  modified_base 13: mod_base = OTHER; note = 2'-fluoro nucleotide
  modified_base 14: mod_base = OTHER; note = 2'-O-Methyl nucleotide
  modified_base 15: mod_base = OTHER; note = 2'-fluoro nucleotide
  modified_base 16: mod_base = OTHER; note = 2'-O-Methyl nucleotide
  modified_base 17: mod_base = OTHER; note = 2'-fluoro nucleotide
  modified_base 18: mod_base = OTHER; note = 2'-O-Methyl nucleotide
  modified_base 19: mod_base = OTHER; note = 2'-fluoro nucleotide
  modified_base 20: mod_base = OTHER; note = deoxy-thymine phosphorothioate
  misc_feature 1..19: note = RNA
  misc_feature 20..21: note = DNA
cggagtcccgagctagccctt

SEQ ID NO: 1209 - DNA, 21 bp, synthetic construct
  misc_feature 1..21: note = Description of Artificial Sequence: Synthetic oligonucleotide
  source 1..21: mol_type = other DNA
  modified_base 1: mod_base = OTHER; note = 2'-fluoro nucleotide
  modified_base 2: mod_base = OTHER; note = 2'-fluoro nucleotide
  modified_base 3: mod_base = OTHER; note = 2'-O-Methyl nucleotide
  modified_base 4: mod_base = OTHER; note = 2'-fluoro nucleotide
  modified_base 5: mod_base = OTHER; note = 2'-O-Methyl nucleotide
  modified_base 6: mod_base = OTHER; note = 2'-fluoro nucleotide
  modified_base 7: mod_base = OTHER; note = 2'-O-Methyl nucleotide
  modified_base 8: mod_base = OTHER; note = 2'-fluoro nucleotide
  modified_base 9: mod_base = OTHER; note = 2'-O-Methyl nucleotide
  modified_base 10: mod_base = OTHER; note = 2'-fluoro nucleotide
  modified_base 11: mod_base = OTHER; note = 2'-O-Methyl nucleotide
  modified_base 12: mod_base = OTHER; note = 2'-fluoro nucleotide
  modified_base 13: mod_base = OTHER; note = 2'-O-Methyl nucleotide
  modified_base 14: mod_base = OTHER; note = 2'-fluoro nucleotide
  modified_base 15: mod_base = OTHER; note = 2'-O-Methyl nucleotide
  modified_base 16: mod_base = OTHER; note = 2'-fluoro nucleotide
  modified_base 17: mod_base = OTHER; note = 2'-O-Methyl nucleotide
  modified_base 18: mod_base = OTHER; note = 2'-fluoro nucleotide
  modified_base 19: mod_base = OTHER; note = 2'-O-Methyl nucleotide
  modified_base 20: mod_base = OTHER; note = deoxy-thymine phosphorothioate
  misc_feature 1..19: note = RNA
  misc_feature 20..21: note = DNA
gggctagctcgggactccgtt

SEQ ID NO: 1210 - DNA, 21 bp, synthetic construct
  misc_feature 1..21: note = Description of Artificial Sequence: Synthetic oligonucleotide
  source 1..21: mol_type = other DNA
  modified_base 1: mod_base = OTHER; note = 2'-O-Methyl nucleotide
  modified_base 2: mod_base = OTHER; note = 2'-O-Methyl nucleotide
  modified_base 3: mod_base = OTHER; note = 2'-fluoro nucleotide
  modified_base 4: mod_base = OTHER; note = 2'-O-Methyl nucleotide
  modified_base 5: mod_base = OTHER; note = 2'-fluoro nucleotide
  modified_base 6: mod_base = OTHER; note = 2'-O-Methyl nucleotide
  modified_base 7: mod_base = OTHER; note = 2'-fluoro nucleotide
  modified_base 8: mod_base = OTHER; note = 2'-O-Methyl nucleotide
  modified_base 9: mod_base = OTHER; note = 2'-fluoro nucleotide
  modified_base 10: mod_base = OTHER; note = 2'-O-Methyl nucleotide
  modified_base 11: mod_base = OTHER; note = 2'-fluoro nucleotide
  modified_base 12: mod_base = OTHER; note = 2'-O-Methyl nucleotide
  modified_base 13: mod_base = OTHER; note = 2'-fluoro nucleotide
  modified_base 14: mod_base = OTHER; note = 2'-O-Methyl nucleotide
  modified_base 15: mod_base = OTHER; note = 2'-fluoro nucleotide
  modified_base 16: mod_base = OTHER; note = 2'-O-Methyl nucleotide
  modified_base 17: mod_base = OTHER; note = 2'-fluoro nucleotide
  modified_base 18: mod_base = OTHER; note = 2'-O-Methyl nucleotide
  modified_base 19: mod_base = OTHER; note = 2'-fluoro nucleotide
  modified_base 20: mod_base = OTHER; note = deoxy-thymine phosphorothioate
  misc_feature 1..19: note = RNA
  misc_feature 20..21: note = DNA
ggagtcccgagctagcccctt

SEQ ID NO: 1211 - DNA, 21 bp, synthetic construct
  misc_feature 1..21: note = Description of Artificial Sequence: Synthetic oligonucleotide
  source 1..21: mol_type = other DNA
  modified_base 1: mod_base = OTHER; note = 2'-fluoro nucleotide
  modified_base 2: mod_base = OTHER; note = 2'-fluoro nucleotide
  modified_base 3: mod_base = OTHER; note = 2'-O-Methyl nucleotide
  modified_base 4: mod_base = OTHER; note = 2'-fluoro nucleotide
  modified_base 5: mod_base = OTHER; note = 2'-O-Methyl nucleotide
  modified_base 6: mod_base = OTHER; note = 2'-fluoro nucleotide
  modified_base 7: mod_base = OTHER; note = 2'-O-Methyl nucleotide
  modified_base 8: mod_base = OTHER; note = 2'-fluoro nucleotide
  modified_base 9: mod_base = OTHER; note = 2'-O-Methyl nucleotide
  modified_base 10: mod_base = OTHER; note = 2'-fluoro nucleotide
  modified_base 11: mod_base = OTHER; note = 2'-O-Methyl nucleotide
  modified_base 12: mod_base = OTHER; note = 2'-fluoro nucleotide
  modified_base 13: mod_base = OTHER; note = 2'-O-Methyl nucleotide
  modified_base 14: mod_base = OTHER; note = 2'-fluoro nucleotide
  modified_base 15: mod_base = OTHER; note = 2'-O-Methyl nucleotide
  modified_base 16: mod_base = OTHER; note = 2'-fluoro nucleotide
  modified_base 17: mod_base = OTHER; note = 2'-O-Methyl nucleotide
  modified_base 18: mod_base = OTHER; note = 2'-fluoro nucleotide
  modified_base 19: mod_base = OTHER; note = 2'-O-Methyl nucleotide
  modified_base 20: mod_base = OTHER; note = deoxy-thymine phosphorothioate
  misc_feature 1..19: note = RNA
  misc_feature 20..21: note = DNA
ggggctagctcgggactcctt

SEQ ID NO: 1212 - DNA, 21 bp, synthetic construct
  misc_feature 1..21: note = Description of Artificial Sequence: Synthetic oligonucleotide
  source 1..21: mol_type = other DNA
  modified_base 1: mod_base = OTHER; note = 2'-O-Methyl nucleotide
  modified_base 2: mod_base = OTHER; note = 2'-O-Methyl nucleotide
  modified_base 3: mod_base = OTHER; note = 2'-fluoro nucleotide
  modified_base 4: mod_base = OTHER; note = 2'-O-Methyl nucleotide
  modified_base 5: mod_base = OTHER; note = 2'-fluoro nucleotide
  modified_base 6: mod_base = OTHER; note = 2'-O-Methyl nucleotide
  modified_base 7: mod_base = OTHER; note = 2'-fluoro nucleotide
  modified_base 8: mod_base = OTHER; note = 2'-O-Methyl nucleotide
  modified_base 9: mod_base = OTHER; note = 2'-fluoro nucleotide
  modified_base 10: mod_base = OTHER; note = 2'-O-Methyl nucleotide
  modified_base 11: mod_base = OTHER; note = 2'-fluoro nucleotide
  modified_base 12: mod_base = OTHER; note = 2'-O-Methyl nucleotide
  modified_base 13: mod_base = OTHER; note = 2'-fluoro nucleotide
  modified_base 14: mod_base = OTHER; note = 2'-O-Methyl nucleotide
  modified_base 15: mod_base = OTHER; note = 2'-fluoro nucleotide
  modified_base 16: mod_base = OTHER; note = 2'-O-Methyl nucleotide
  modified_base 17: mod_base = OTHER; note = 2'-fluoro nucleotide
  modified_base 18: mod_base = OTHER; note = 2'-O-Methyl nucleotide
  modified_base 19: mod_base = OTHER; note = 2'-fluoro nucleotide
  modified_base 20: mod_base = OTHER; note = deoxy-thymine phosphorothioate
  misc_feature 1..19: note = RNA
  misc_feature 20..21: note = DNA
gagtcccgagctagccccgtt

SEQ ID NO: 1213 - DNA, 21 bp, synthetic construct
  misc_feature 1..21: note = Description of Artificial Sequence: Synthetic oligonucleotide
  source 1..21: mol_type = other DNA
  modified_base 1: mod_base = OTHER; note = 2'-fluoro nucleotide
  modified_base 2: mod_base = OTHER; note = 2'-fluoro nucleotide
  modified_base 3: mod_base = OTHER; note = 2'-O-Methyl nucleotide
  modified_base 4: mod_base = OTHER; note = 2'-fluoro nucleotide
  modified_base 5: mod_base = OTHER; note = 2'-O-Methyl nucleotide
  modified_base 6: mod_base = OTHER; note = 2'-fluoro nucleotide
  modified_base 7: mod_base = OTHER; note = 2'-O-Methyl nucleotide
  modified_base 8: mod_base = OTHER; note = 2'-fluoro nucleotide
  modified_base 9: mod_base = OTHER; note = 2'-O-Methyl nucleotide
  modified_base 10: mod_base = OTHER; note = 2'-fluoro nucleotide
  modified_base 11: mod_base = OTHER; note = 2'-O-Methyl nucleotide
  modified_base 12: mod_base = OTHER; note = 2'-fluoro nucleotide
  modified_base 13: mod_base = OTHER; note = 2'-O-Methyl nucleotide
  modified_base 14: mod_base = OTHER; note = 2'-fluoro nucleotide
  modified_base 15: mod_base = OTHER; note = 2'-O-Methyl nucleotide
  modified_base 16: mod_base = OTHER; note = 2'-fluoro nucleotide
  modified_base 17: mod_base = OTHER; note = 2'-O-Methyl nucleotide
  modified_base 18: mod_base = OTHER; note = 2'-fluoro nucleotide
  modified_base 19: mod_base = OTHER; note = 2'-O-Methyl nucleotide
  modified_base 20: mod_base = OTHER; note = deoxy-thymine phosphorothioate
  misc_feature 1..19: note = RNA
  misc_feature 20..21: note = DNA
cggggctagctcgggactctt

SEQ ID NO: 1214 - DNA, 21 bp, synthetic construct
  misc_feature 1..21: note = Description of Artificial Sequence: Synthetic oligonucleotide
  source 1..21: mol_type = other DNA
  modified_base 1: mod_base = OTHER; note = 2'-O-Methyl nucleotide
  modified_base 2: mod_base = OTHER; note = 2'-O-Methyl nucleotide
  modified_base 3: mod_base = OTHER; note = 2'-fluoro nucleotide
  modified_base 4: mod_base = OTHER; note = 2'-O-Methyl nucleotide
  modified_base 5: mod_base = OTHER; note = 2'-fluoro nucleotide
  modified_base 6: mod_base = OTHER; note = 2'-O-Methyl nucleotide
  modified_base 7: mod_base = OTHER; note = 2'-fluoro nucleotide
  modified_base 8: mod_base = OTHER; note = 2'-O-Methyl nucleotide
  modified_base 9: mod_base = OTHER; note = 2'-fluoro nucleotide
  modified_base 10: mod_base = OTHER; note = 2'-O-Methyl nucleotide
  modified_base 11: mod_base = OTHER; note = 2'-fluoro nucleotide
  modified_base 12: mod_base = OTHER; note = 2'-O-Methyl nucleotide
  modified_base 13: mod_base = OTHER; note = 2'-fluoro nucleotide
  modified_base 14: mod_base = OTHER; note = 2'-O-Methyl nucleotide
  modified_base 15: mod_base = OTHER; note = 2'-fluoro nucleotide
  modified_base 16: mod_base = OTHER; note = 2'-O-Methyl nucleotide
  modified_base 17: mod_base = OTHER; note = 2'-fluoro nucleotide
  modified_base 18: mod_base = OTHER; note = 2'-O-Methyl nucleotide
  modified_base 19: mod_base = OTHER; note = 2'-fluoro nucleotide
  modified_base 20: mod_base = OTHER; note = deoxy-thymine phosphorothioate
  misc_feature 1..19: note = RNA
  misc_feature 20..21: note = DNA
agtcccgagctagccccggtt

SEQ ID NO: 1215 - DNA, 21 bp, synthetic construct
  misc_feature 1..21: note = Description of Artificial Sequence: Synthetic oligonucleotide
  source 1..21: mol_type = other DNA
  modified_base 1: mod_base = OTHER; note = 2'-fluoro nucleotide
  modified_base 2: mod_base = OTHER; note = 2'-fluoro nucleotide
  modified_base 3: mod_base = OTHER; note = 2'-O-Methyl nucleotide
  modified_base 4: mod_base = OTHER; note = 2'-fluoro nucleotide
  modified_base 5: mod_base = OTHER; note = 2'-O-Methyl nucleotide
  modified_base 6: mod_base = OTHER; note = 2'-fluoro nucleotide
  modified_base 7: mod_base = OTHER; note = 2'-O-Methyl nucleotide
  modified_base 8: mod_base = OTHER; note = 2'-fluoro nucleotide
  modified_base 9: mod_base = OTHER; note = 2'-O-Methyl nucleotide
  modified_base 10: mod_base = OTHER; note = 2'-fluoro nucleotide
  modified_base 11: mod_base = OTHER; note = 2'-O-Methyl nucleotide
  modified_base 12: mod_base = OTHER; note = 2'-fluoro nucleotide
  modified_base 13: mod_base = OTHER; note = 2'-O-Methyl nucleotide
  modified_base 14: mod_base = OTHER; note = 2'-fluoro nucleotide
  modified_base 15: mod_base = OTHER; note = 2'-O-Methyl nucleotide
  modified_base 16: mod_base = OTHER; note = 2'-fluoro nucleotide
  modified_base 17: mod_base = OTHER; note = 2'-O-Methyl nucleotide
  modified_base 18: mod_base = OTHER; note = 2'-fluoro nucleotide
  modified_base 19: mod_base = OTHER; note = 2'-O-Methyl nucleotide
  modified_base 20: mod_base = OTHER; note = deoxy-thymine phosphorothioate
  misc_feature 1..19: note = RNA
  misc_feature 20..21: note = DNA
ccggggctagctcgggacttt

SEQ ID NO: 1216 - DNA, 21 bp, synthetic construct
  misc_feature 1..21: note = Description of Artificial Sequence: Synthetic oligonucleotide
  source 1..21: mol_type = other DNA
  modified_base 1: mod_base = OTHER; note = 2'-O-Methyl nucleotide
  modified_base 2: mod_base = OTHER; note = 2'-O-Methyl nucleotide
  modified_base 3: mod_base = OTHER; note = 2'-fluoro nucleotide
  modified_base 4: mod_base = OTHER; note = 2'-O-Methyl nucleotide
  modified_base 5: mod_base = OTHER; note = 2'-fluoro nucleotide
  modified_base 6: mod_base = OTHER; note = 2'-O-Methyl nucleotide
  modified_base 7: mod_base = OTHER; note = 2'-fluoro nucleotide
  modified_base 8: mod_base = OTHER; note = 2'-O-Methyl nucleotide
  modified_base 9: mod_base = OTHER; note = 2'-fluoro nucleotide
  modified_base 10: mod_base = OTHER; note = 2'-O-Methyl nucleotide
  modified_base 11: mod_base = OTHER; note = 2'-fluoro nucleotide
  modified_base 12: mod_base = OTHER; note = 2'-O-Methyl nucleotide
  modified_base 13: mod_base = OTHER; note = 2'-fluoro nucleotide
  modified_base 14: mod_base = OTHER; note = 2'-O-Methyl nucleotide
  modified_base 15: mod_base = OTHER; note = 2'-fluoro nucleotide
  modified_base 16: mod_base = OTHER; note = 2'-O-Methyl nucleotide
  modified_base 17: mod_base = OTHER; note = 2'-fluoro nucleotide
  modified_base 18: mod_base = OTHER; note = 2'-O-Methyl nucleotide
  modified_base 19: mod_base = OTHER; note = 2'-fluoro nucleotide
  modified_base 20: mod_base = OTHER; note = deoxy-thymine phosphorothioate
  misc_feature 1..19: note = RNA
  misc_feature 20..21: note = DNA
gtcccgagctagccccggctt

SEQ ID NO: 1217 - DNA, 21 bp, synthetic construct
  misc_feature 1..21: note = Description of Artificial Sequence: Synthetic oligonucleotide
  source 1..21: mol_type = other DNA
  modified_base 1: mod_base = OTHER; note = 2'-fluoro nucleotide
  modified_base 2: mod_base = OTHER; note = 2'-fluoro nucleotide
  modified_base 3: mod_base = OTHER; note = 2'-O-Methyl nucleotide
  modified_base 4: mod_base = OTHER; note = 2'-fluoro nucleotide
  modified_base 5: mod_base = OTHER; note = 2'-O-Methyl nucleotide
  modified_base 6: mod_base = OTHER; note = 2'-fluoro nucleotide
  modified_base 7: mod_base = OTHER; note = 2'-O-Methyl nucleotide
  modified_base 8: mod_base = OTHER; note = 2'-fluoro nucleotide
  modified_base 9: mod_base = OTHER; note = 2'-O-Methyl nucleotide
  modified_base 10: mod_base = OTHER; note = 2'-fluoro nucleotide
  modified_base 11: mod_base = OTHER; note = 2'-O-Methyl nucleotide
  modified_base 12: mod_base = OTHER; note = 2'-fluoro nucleotide
  modified_base 13: mod_base = OTHER; note = 2'-O-Methyl nucleotide
  modified_base 14: mod_base = OTHER; note = 2'-fluoro nucleotide
  modified_base 15: mod_base = OTHER; note = 2'-O-Methyl nucleotide
  modified_base 16: mod_base = OTHER; note = 2'-fluoro nucleotide
  modified_base 17: mod_base = OTHER; note = 2'-O-Methyl nucleotide
  modified_base 18: mod_base = OTHER; note = 2'-fluoro nucleotide
  modified_base 19: mod_base = OTHER; note = 2'-O-Methyl nucleotide
  modified_base 20: mod_base = OTHER; note = deoxy-thymine phosphorothioate
  misc_feature 1..19: note = RNA
  misc_feature 20..21: note = DNA
gccggggctagctcgggactt

SEQ ID NO: 1218 - DNA, 21 bp, synthetic construct
  misc_feature 1..21: note = Description of Artificial Sequence: Synthetic oligonucleotide
  source 1..21: mol_type = other DNA
  modified_base 1: mod_base = OTHER; note = 2'-O-Methyl nucleotide
  modified_base 2: mod_base = OTHER; note = 2'-O-Methyl nucleotide
  modified_base 3: mod_base = OTHER; note = 2'-fluoro nucleotide
  modified_base 4: mod_base = OTHER; note = 2'-O-Methyl nucleotide
  modified_base 5: mod_base = OTHER; note = 2'-fluoro nucleotide
  modified_base 6: mod_base = OTHER; note = 2'-O-Methyl nucleotide
  modified_base 7: mod_base = OTHER; note = 2'-fluoro nucleotide
  modified_base 8: mod_base = OTHER; note = 2'-O-Methyl nucleotide
  modified_base 9: mod_base = OTHER; note = 2'-fluoro nucleotide
  modified_base 10: mod_base = OTHER; note = 2'-O-Methyl nucleotide
  modified_base 11: mod_base = OTHER; note = 2'-fluoro nucleotide
  modified_base 12: mod_base = OTHER; note = 2'-O-Methyl nucleotide
  modified_base 13: mod_base = OTHER; note = 2'-fluoro nucleotide
  modified_base 14: mod_base = OTHER; note = 2'-O-Methyl nucleotide
  modified_base 15: mod_base = OTHER; note = 2'-fluoro nucleotide
  modified_base 16: mod_base = OTHER; note = 2'-O-Methyl nucleotide
  modified_base 17: mod_base = OTHER; note = 2'-fluoro nucleotide
  modified_base 18: mod_base = OTHER; note = 2'-O-Methyl nucleotide
  modified_base 19: mod_base = OTHER; note = 2'-fluoro nucleotide
  modified_base 20: mod_base = OTHER; note = deoxy-thymine phosphorothioate
  misc_feature 1..19: note = RNA
  misc_feature 20..21: note = DNA
cccgagctagccccggcggtt

SEQ ID NO: 1219 - DNA, 21 bp, synthetic construct
  misc_feature 1..21: note = Description of Artificial Sequence: Synthetic oligonucleotide
  source 1..21: mol_type = other DNA
  modified_base 1: mod_base = OTHER; note = 2'-fluoro nucleotide
  modified_base 2: mod_base = OTHER; note = 2'-fluoro nucleotide
  modified_base 3: mod_base = OTHER; note = 2'-O-Methyl nucleotide
  modified_base 4: mod_base = OTHER; note = 2'-fluoro nucleotide
  modified_base 5: mod_base = OTHER; note = 2'-O-Methyl nucleotide
  modified_base 6: mod_base = OTHER; note = 2'-fluoro nucleotide
  modified_base 7: mod_base = OTHER; note = 2'-O-Methyl nucleotide
  modified_base 8: mod_base = OTHER; note = 2'-fluoro nucleotide
  modified_base 9: mod_base = OTHER; note = 2'-O-Methyl nucleotide
  modified_base 10: mod_base = OTHER; note = 2'-fluoro nucleotide
  modified_base 11: mod_base = OTHER; note = 2'-O-Methyl nucleotide
  modified_base 12: mod_base = OTHER; note = 2'-fluoro nucleotide
  modified_base 13: mod_base = OTHER; note = 2'-O-Methyl nucleotide
  modified_base 14: mod_base = OTHER; note = 2'-fluoro nucleotide
  modified_base 15: mod_base = OTHER; note = 2'-O-Methyl nucleotide
  modified_base 16: mod_base = OTHER; note = 2'-fluoro nucleotide
  modified_base 17: mod_base = OTHER; note = 2'-O-Methyl nucleotide
  modified_base 18: mod_base = OTHER; note = 2'-fluoro nucleotide
  modified_base 19: mod_base = OTHER; note = 2'-O-Methyl nucleotide
  modified_base 20: mod_base = OTHER; note = deoxy-thymine phosphorothioate
  misc_feature 1..19: note = RNA
  misc_feature 20..21: note = DNA
ccgccggggctagctcgggtt

SEQ ID NO: 1220 - DNA, 21 bp, synthetic construct
  misc_feature 1..21: note = Description of Artificial Sequence: Synthetic oligonucleotide
  source 1..21: mol_type = other DNA
  modified_base 1: mod_base = OTHER; note = 2'-O-Methyl nucleotide
  modified_base 2: mod_base = OTHER; note = 2'-O-Methyl nucleotide
  modified_base 3: mod_base = OTHER; note = 2'-fluoro nucleotide
  modified_base 4: mod_base = OTHER; note = 2'-O-Methyl nucleotide
  modified_base 5: mod_base = OTHER; note = 2'-fluoro nucleotide
  modified_base 6: mod_base = OTHER; note = 2'-O-Methyl nucleotide
  modified_base 7: mod_base = OTHER; note = 2'-fluoro nucleotide
  modified_base 8: mod_base = OTHER; note = 2'-O-Methyl nucleotide
  modified_base 9: mod_base = OTHER; note = 2'-fluoro nucleotide
  modified_base 10: mod_base = OTHER; note = 2'-O-Methyl nucleotide
  modified_base 11: mod_base = OTHER; note = 2'-fluoro nucleotide
  modified_base 12: mod_base = OTHER; note = 2'-O-Methyl nucleotide
  modified_base 13: mod_base = OTHER; note = 2'-fluoro nucleotide
  modified_base 14: mod_base = OTHER; note = 2'-O-Methyl nucleotide
  modified_base 15: mod_base = OTHER; note = 2'-fluoro nucleotide
  modified_base 16: mod_base = OTHER; note = 2'-O-Methyl nucleotide
  modified_base 17: mod_base = OTHER; note = 2'-fluoro nucleotide
  modified_base 18: mod_base = OTHER; note = 2'-O-Methyl nucleotide
  modified_base 19: mod_base = OTHER; note = 2'-fluoro nucleotide
  modified_base 20: mod_base = OTHER; note = deoxy-thymine phosphorothioate
  misc_feature 1..19: note = RNA
  misc_feature 20..21: note = DNA
ggacgacaggccacctcgttt

SEQ ID NO: 1221 - DNA, 21 bp, synthetic construct
  misc_feature 1..21: note = Description of Artificial Sequence: Synthetic oligonucleotide
  source 1..21: mol_type = other DNA
  modified_base 1: mod_base = OTHER; note = 2'-fluoro nucleotide
  modified_base 2: mod_base = OTHER; note = 2'-fluoro nucleotide
  modified_base 3: mod_base = OTHER; note = 2'-O-Methyl nucleotide
  modified_base 4: mod_base = OTHER; note = 2'-fluoro nucleotide
  modified_base 5: mod_base = OTHER; note = 2'-O-Methyl nucleotide
  modified_base 6: mod_base = OTHER; note = 2'-fluoro nucleotide
  modified_base 7: mod_base = OTHER; note = 2'-O-Methyl nucleotide
  modified_base 8: mod_base = OTHER; note = 2'-fluoro nucleotide
  modified_base 9: mod_base = OTHER; note = 2'-O-Methyl nucleotide
  modified_base 10: mod_base = OTHER; note = 2'-fluoro nucleotide
  modified_base 11: mod_base = OTHER; note = 2'-O-Methyl nucleotide
  modified_base 12: mod_base = OTHER; note = 2'-fluoro nucleotide
  modified_base 13: mod_base = OTHER; note = 2'-O-Methyl nucleotide
  modified_base 14: mod_base = OTHER; note = 2'-fluoro nucleotide
  modified_base 15: mod_base = OTHER; note = 2'-O-Methyl nucleotide
  modified_base 16: mod_base = OTHER; note = 2'-fluoro nucleotide
  modified_base 17: mod_base = OTHER; note = 2'-O-Methyl nucleotide
  modified_base 18: mod_base = OTHER; note = 2'-fluoro nucleotide
  modified_base 19: mod_base = OTHER; note = 2'-O-Methyl nucleotide
  modified_base 20: mod_base = OTHER; note = deoxy-thymine phosphorothioate
  misc_feature 1..19: note = RNA
  misc_feature 20..21: note = DNA
acgaggtggcctgtcgtcctt

SEQ ID NO: 1222 - DNA, 21 bp, synthetic construct
  misc_feature 1..21: note = Description of Artificial Sequence: Synthetic oligonucleotide
  source 1..21: mol_type = other DNA
  modified_base 1: mod_base = OTHER; note = 2'-O-Methyl nucleotide
  modified_base 2: mod_base = OTHER; note = 2'-O-Methyl nucleotide
  modified_base 3: mod_base = OTHER; note = 2'-fluoro nucleotide
  modified_base 4: mod_base = OTHER; note = 2'-O-Methyl nucleotide
  modified_base 5: mod_base = OTHER; note = 2'-fluoro nucleotide
  modified_base 6: mod_base = OTHER; note = 2'-O-Methyl nucleotide
  modified_base 7: mod_base = OTHER; note = 2'-fluoro nucleotide
  modified_base 8: mod_base = OTHER; note = 2'-O-Methyl nucleotide
  modified_base 9: mod_base = OTHER; note = 2'-fluoro nucleotide
  modified_base 10: mod_base = OTHER; note = 2'-O-Methyl nucleotide
  modified_base 11: mod_base = OTHER; note = 2'-fluoro nucleotide
  modified_base 12: mod_base = OTHER; note = 2'-O-Methyl nucleotide
  modified_base 13: mod_base = OTHER; note = 2'-fluoro nucleotide
  modified_base 14: mod_base = OTHER; note = 2'-O-Methyl nucleotide
  modified_base 15: mod_base = OTHER; note = 2'-fluoro nucleotide
  modified_base 16: mod_base = OTHER; note = 2'-O-Methyl nucleotide
  modified_base 17: mod_base = OTHER; note = 2'-fluoro nucleotide
  modified_base 18: mod_base = OTHER; note = 2'-O-Methyl nucleotide
  modified_base 19: mod_base = OTHER; note = 2'-fluoro nucleotide
  modified_base 20: mod_base = OTHER; note = deoxy-thymine phosphorothioate
  misc_feature 1..19: note = RNA
  misc_feature 20..21: note = DNA
gacgacaggccacctcgtctt

SEQ ID NO: 1223 - DNA, 21 bp, synthetic construct
  misc_feature 1..21: note = Description of Artificial Sequence: Synthetic oligonucleotide
  source 1..21: mol_type = other DNA
  modified_base 1: mod_base = OTHER; note = 2'-fluoro nucleotide
  modified_base 2: mod_base = OTHER; note = 2'-fluoro nucleotide
  modified_base 3: mod_base = OTHER; note = 2'-O-Methyl nucleotide
  modified_base 4: mod_base = OTHER; note = 2'-fluoro nucleotide
  modified_base 5: mod_base = OTHER; note = 2'-O-Methyl nucleotide
  modified_base 6: mod_base = OTHER; note = 2'-fluoro nucleotide
  modified_base 7: mod_base = OTHER; note = 2'-O-Methyl nucleotide
  modified_base 8: mod_base = OTHER; note = 2'-fluoro nucleotide
  modified_base 9: mod_base = OTHER; note = 2'-O-Methyl nucleotide
  modified_base 10: mod_base = OTHER; note = 2'-fluoro nucleotide
  modified_base 11: mod_base = OTHER; note = 2'-O-Methyl nucleotide
  modified_base 12: mod_base = OTHER; note = 2'-fluoro nucleotide
  modified_base 13: mod_base = OTHER; note = 2'-O-Methyl nucleotide
  modified_base 14: mod_base = OTHER; note = 2'-fluoro nucleotide
  modified_base 15: mod_base = OTHER; note = 2'-O-Methyl nucleotide
  modified_base 16: mod_base = OTHER; note = 2'-fluoro nucleotide
  modified_base 17: mod_base = OTHER; note = 2'-O-Methyl nucleotide
  modified_base 18: mod_base = OTHER; note = 2'-fluoro nucleotide
  modified_base 19: mod_base = OTHER; note = 2'-O-Methyl nucleotide
  modified_base 20: mod_base = OTHER; note = deoxy-thymine phosphorothioate
  misc_feature 1..19: note = RNA
  misc_feature 20..21: note = DNA
gacgaggtggcctgtcgtctt

SEQ ID NO: 1224 - DNA, 21 bp, synthetic construct
  misc_feature 1..21: note = Description of Artificial Sequence: Synthetic oligonucleotide
  source 1..21: mol_type = other DNA
  modified_base 1: mod_base = OTHER; note = 2'-O-Methyl nucleotide
  modified_base 2: mod_base = OTHER; note = 2'-O-Methyl nucleotide
  modified_base 3: mod_base = OTHER; note = 2'-fluoro nucleotide
  modified_base 4: mod_base = OTHER; note = 2'-O-Methyl nucleotide
  modified_base 5: mod_base = OTHER; note = 2'-fluoro nucleotide
  modified_base 6: mod_base = OTHER; note = 2'-O-Methyl nucleotide
  modified_base 7: mod_base = OTHER; note = 2'-fluoro nucleotide
  modified_base 8: mod_base = OTHER; note = 2'-O-Methyl nucleotide
  modified_base 9: mod_base = OTHER; note = 2'-fluoro nucleotide
  modified_base 10: mod_base = OTHER; note = 2'-O-Methyl nucleotide
  modified_base 11: mod_base = OTHER; note = 2'-fluoro nucleotide
  modified_base 12: mod_base = OTHER; note = 2'-O-Methyl nucleotide
  modified_base 13: mod_base = OTHER; note = 2'-fluoro nucleotide
  modified_base 14: mod_base = OTHER; note = 2'-O-Methyl nucleotide
  modified_base 15: mod_base = OTHER; note = 2'-fluoro nucleotide
  modified_base 16: mod_base = OTHER; note = 2'-O-Methyl nucleotide
  modified_base 17: mod_base = OTHER; note = 2'-fluoro nucleotide
  modified_base 18: mod_base = OTHER; note = 2'-O-Methyl nucleotide
  modified_base 19: mod_base = OTHER; note = 2'-fluoro nucleotide
  modified_base 20: mod_base = OTHER; note = deoxy-thymine phosphorothioate
  misc_feature 1..19: note = RNA
  misc_feature 20..21: note = DNA
acgacaggccacctcgtcgtt

SEQ ID NO: 1225 - DNA, 21 bp, synthetic construct
  misc_feature 1..21: note = Description of Artificial Sequence: Synthetic oligonucleotide
  source 1..21: mol_type = other DNA
  modified_base 1: mod_base = OTHER; note = 2'-fluoro nucleotide
  modified_base 2: mod_base = OTHER; note = 2'-fluoro nucleotide
  modified_base 3: mod_base = OTHER; note = 2'-O-Methyl nucleotide
  modified_base 4: mod_base = OTHER; note = 2'-fluoro nucleotide
  modified_base 5: mod_base = OTHER; note = 2'-O-Methyl nucleotide
  modified_base 6: mod_base = OTHER; note = 2'-fluoro nucleotide
  modified_base 7: mod_base = OTHER; note = 2'-O-Methyl nucleotide
  modified_base 8: mod_base = OTHER; note = 2'-fluoro nucleotide
  modified_base 9: mod_base = OTHER; note = 2'-O-Methyl nucleotide
  modified_base 10: mod_base = OTHER; note = 2'-fluoro nucleotide
  modified_base 11: mod_base = OTHER; note = 2'-O-Methyl nucleotide
  modified_base 12: mod_base = OTHER; note = 2'-fluoro nucleotide
  modified_base 13: mod_base = OTHER; note = 2'-O-Methyl nucleotide
  modified_base 14: mod_base = OTHER; note = 2'-fluoro nucleotide
  modified_base 15: mod_base = OTHER; note = 2'-O-Methyl nucleotide
  modified_base 16: mod_base = OTHER; note = 2'-fluoro nucleotide
  modified_base 17: mod_base = OTHER; note = 2'-O-Methyl nucleotide
  modified_base 18: mod_base = OTHER; note = 2'-fluoro nucleotide
  modified_base 19: mod_base = OTHER; note = 2'-O-Methyl nucleotide
  modified_base 20: mod_base = OTHER; note = deoxy-thymine phosphorothioate
  misc_feature 1..19: note = RNA
  misc_feature 20..21: note = DNA
cgacgaggtggcctgtcgttt

SEQ ID NO: 1226 - DNA, 21 bp, synthetic construct
  misc_feature 1..21: note = Description of Artificial Sequence: Synthetic oligonucleotide
  source 1..21: mol_type = other DNA
  modified_base 1: mod_base = OTHER; note = 2'-O-Methyl nucleotide
  modified_base 2: mod_base = OTHER; note = 2'-O-Methyl nucleotide
  modified_base 3: mod_base = OTHER; note = 2'-fluoro nucleotide
  modified_base 4: mod_base = OTHER; note = 2'-O-Methyl nucleotide
  modified_base 5: mod_base = OTHER; note = 2'-fluoro nucleotide
  modified_base 6: mod_base = OTHER; note = 2'-O-Methyl nucleotide
  modified_base 7: mod_base = OTHER; note = 2'-fluoro nucleotide
  modified_base 8: mod_base = OTHER; note = 2'-O-Methyl nucleotide
  modified_base 9: mod_base = OTHER; note = 2'-fluoro nucleotide
  modified_base 10: mod_base = OTHER; note = 2'-O-Methyl nucleotide
  modified_base 11: mod_base = OTHER; note = 2'-fluoro nucleotide
  modified_base 12: mod_base = OTHER; note = 2'-O-Methyl nucleotide
  modified_base 13: mod_base = OTHER; note = 2'-fluoro nucleotide
  modified_base 14: mod_base = OTHER; note = 2'-O-Methyl nucleotide
  modified_base 15: mod_base = OTHER; note = 2'-fluoro nucleotide
  modified_base 16: mod_base = OTHER; note = 2'-O-Methyl nucleotide
  modified_base 17: mod_base = OTHER; note = 2'-fluoro nucleotide
  modified_base 18: mod_base = OTHER; note = 2'-O-Methyl nucleotide
  modified_base 19: mod_base = OTHER; note = 2'-fluoro nucleotide
  modified_base 20: mod_base = OTHER; note = deoxy-thymine phosphorothioate
  misc_feature 1..19: note = RNA
  misc_feature 20..21: note = DNA
cgacaggccacctcgtcggtt

SEQ ID NO: 1227 - DNA, 21 bp, synthetic construct
  misc_feature 1..21: note = Description of Artificial Sequence: Synthetic oligonucleotide
  source 1..21: mol_type = other DNA
  modified_base 1: mod_base = OTHER; note = 2'-fluoro nucleotide
  modified_base 2: mod_base = OTHER; note = 2'-fluoro nucleotide
  modified_base 3: mod_base = OTHER; note = 2'-O-Methyl nucleotide
  modified_base 4: mod_base = OTHER; note = 2'-fluoro nucleotide
  modified_base 5: mod_base = OTHER; note = 2'-O-Methyl nucleotide
  modified_base 6: mod_base = OTHER; note = 2'-fluoro nucleotide
  modified_base 7: mod_base = OTHER; note = 2'-O-Methyl nucleotide
  modified_base 8: mod_base = OTHER; note = 2'-fluoro nucleotide
  modified_base 9: mod_base = OTHER; note = 2'-O-Methyl nucleotide
  modified_base 10: mod_base = OTHER; note = 2'-fluoro nucleotide
  modified_base 11: mod_base = OTHER; note = 2'-O-Methyl nucleotide
  modified_base 12: mod_base = OTHER; note = 2'-fluoro nucleotide
  modified_base 13: mod_base = OTHER; note = 2'-O-Methyl nucleotide
  modified_base 14: mod_base = OTHER; note = 2'-fluoro nucleotide
  modified_base 15: mod_base = OTHER; note = 2'-O-Methyl nucleotide
  modified_base 16: mod_base = OTHER; note = 2'-fluoro nucleotide
  modified_base 17: mod_base = OTHER; note = 2'-O-Methyl nucleotide
  modified_base 18: mod_base = OTHER; note = 2'-fluoro nucleotide
  modified_base 19: mod_base = OTHER; note = 2'-O-Methyl nucleotide
  modified_base 20: mod_base = OTHER; note = deoxy-thymine phosphorothioate
  misc_feature 1..19: note = RNA
  misc_feature 20..21: note = DNA
ccgacgaggtggcctgtcgtt

SEQ ID NO: 1228 - DNA, 21 bp, synthetic construct
  misc_feature 1..21: note = Description of Artificial Sequence: Synthetic oligonucleotide
  source 1..21: mol_type = other DNA
  modified_base 1: mod_base = OTHER; note = 2'-O-Methyl nucleotide
  modified_base 2: mod_base = OTHER; note = 2'-O-Methyl nucleotide
  modified_base 3: mod_base = OTHER; note = 2'-fluoro nucleotide
  modified_base 4: mod_base = OTHER; note = 2'-O-Methyl nucleotide
  modified_base 5: mod_base = OTHER; note = 2'-fluoro nucleotide
  modified_base 6: mod_base = OTHER; note = 2'-O-Methyl nucleotide
  modified_base 7: mod_base = OTHER; note = 2'-fluoro nucleotide
  modified_base 8: mod_base = OTHER; note = 2'-O-Methyl nucleotide
  modified_base 9: mod_base = OTHER; note = 2'-fluoro nucleotide
  modified_base 10: mod_base = OTHER; note = 2'-O-Methyl nucleotide
  modified_base 11: mod_base = OTHER; note = 2'-fluoro nucleotide
  modified_base 12: mod_base = OTHER; note = 2'-O-Methyl nucleotide
  modified_base 13: mod_base = OTHER; note = 2'-fluoro nucleotide
  modified_base 14: mod_base = OTHER; note = 2'-O-Methyl nucleotide
  modified_base 15: mod_base = OTHER; note = 2'-fluoro nucleotide
  modified_base 16: mod_base = OTHER; note = 2'-O-Methyl nucleotide
  modified_base 17: mod_base = OTHER; note = 2'-fluoro nucleotide
  modified_base 18: mod_base = OTHER; note = 2'-O-Methyl nucleotide
  modified_base 19: mod_base = OTHER; note = 2'-fluoro nucleotide
  modified_base 20: mod_base = OTHER; note = deoxy-thymine phosphorothioate
  misc_feature 1..19: note = RNA
  misc_feature 20..21: note = DNA
gacaggccacctcgtcggctt

SEQ ID NO: 1229 - DNA, 21 bp, synthetic construct
  misc_feature 1..21: note = Description of Artificial Sequence: Synthetic oligonucleotide
  source 1..21: mol_type = other DNA
  modified_base 1: mod_base = OTHER; note = 2'-fluoro nucleotide
  modified_base 2: mod_base = OTHER; note = 2'-fluoro nucleotide
  modified_base 3: mod_base = OTHER; note = 2'-O-Methyl nucleotide
  modified_base 4: mod_base = OTHER; note = 2'-fluoro nucleotide
  modified_base 5: mod_base = OTHER; note = 2'-O-Methyl nucleotide
  modified_base 6: mod_base = OTHER; note = 2'-fluoro nucleotide
  modified_base 7: mod_base = OTHER; note = 2'-O-Methyl nucleotide
  modified_base 8: mod_base = OTHER; note = 2'-fluoro nucleotide
  modified_base 9: mod_base = OTHER; note = 2'-O-Methyl nucleotide
  modified_base 10: mod_base = OTHER; note = 2'-fluoro nucleotide
  modified_base 11: mod_base = OTHER; note = 2'-O-Methyl nucleotide
  modified_base 12: mod_base = OTHER; note = 2'-fluoro nucleotide
  modified_base 13: mod_base = OTHER; note = 2'-O-Methyl nucleotide
  modified_base 14: mod_base = OTHER; note = 2'-fluoro nucleotide
  modified_base 15: mod_base = OTHER; note = 2'-O-Methyl nucleotide
  modified_base 16: mod_base = OTHER; note = 2'-fluoro nucleotide
  modified_base 17: mod_base = OTHER; note = 2'-O-Methyl nucleotide
  modified_base 18: mod_base = OTHER; note = 2'-fluoro nucleotide
  modified_base 19: mod_base = OTHER; note = 2'-O-Methyl nucleotide
  modified_base 20: mod_base = OTHER; note = deoxy-thymine phosphorothioate
  misc_feature 1..19: note = RNA
  misc_feature 20..21: note = DNA
gccgacgaggtggcctgtctt

SEQ ID NO: 1230 - DNA, 21 bp, synthetic construct
  misc_feature 1..21: note = Description of Artificial Sequence: Synthetic oligonucleotide
  source 1..21: mol_type = other DNA
  modified_base 1: mod_base = OTHER; note = 2'-O-Methyl nucleotide
  modified_base 2: mod_base = OTHER; note = 2'-O-Methyl nucleotide
  modified_base 3: mod_base = OTHER; note = 2'-fluoro nucleotide
  modified_base 4: mod_base = OTHER; note = 2'-O-Methyl nucleotide
  modified_base 5: mod_base = OTHER; note = 2'-fluoro nucleotide
  modified_base 6: mod_base = OTHER; note = 2'-O-Methyl nucleotide
  modified_base 7: mod_base = OTHER; note = 2'-fluoro nucleotide
  modified_base 8: mod_base = OTHER; note = 2'-O-Methyl nucleotide
  modified_base 9: mod_base = OTHER; note = 2'-fluoro nucleotide
  modified_base 10: mod_base = OTHER; note = 2'-O-Methyl nucleotide
  modified_base 11: mod_base = OTHER; note = 2'-fluoro nucleotide
  modified_base 12: mod_base = OTHER; note = 2'-O-Methyl nucleotide
  modified_base 13: mod_base = OTHER; note = 2'-fluoro nucleotide
  modified_base 14: mod_base = OTHER; note = 2'-O-Methyl nucleotide
  modified_base 15: mod_base = OTHER; note = 2'-fluoro nucleotide
  modified_base 16: mod_base = OTHER; note = 2'-O-Methyl nucleotide
  modified_base 17: mod_base = OTHER; note = 2'-fluoro nucleotide
  modified_base 18: mod_base = OTHER; note = 2'-O-Methyl nucleotide
  modified_base 19: mod_base = OTHER; note = 2'-fluoro nucleotide
  modified_base 20: mod_base = OTHER; note = deoxy-thymine phosphorothioate
  misc_feature 1..19: note = RNA
  misc_feature 20..21: note = DNA
caggccacctcgtcggcgttt

SEQ ID NO: 1231 - DNA, 21 bp, synthetic construct
  misc_feature 1..21: note = Description of Artificial Sequence: Synthetic oligonucleotide
  source 1..21: mol_type = other DNA
  modified_base 1: mod_base = OTHER; note = 2'-fluoro nucleotide
  modified_base 2: mod_base = OTHER; note = 2'-fluoro nucleotide
  modified_base 3: mod_base = OTHER; note = 2'-O-Methyl nucleotide
  modified_base 4: mod_base = OTHER; note = 2'-fluoro nucleotide
  modified_base 5: mod_base = OTHER; note = 2'-O-Methyl nucleotide
  modified_base 6: mod_base = OTHER; note = 2'-fluoro nucleotide
  modified_base 7: mod_base = OTHER; note = 2'-O-Methyl nucleotide
  modified_base 8: mod_base = OTHER; note = 2'-fluoro nucleotide
  modified_base 9: mod_base = OTHER; note = 2'-O-Methyl nucleotide
  modified_base 10: mod_base = OTHER; note = 2'-fluoro nucleotide
  modified_base 11: mod_base = OTHER; note = 2'-O-Methyl nucleotide
  modified_base 12: mod_base = OTHER; note = 2'-fluoro nucleotide
  modified_base 13: mod_base = OTHER; note = 2'-O-Methyl nucleotide
  modified_base 14: mod_base = OTHER; note = 2'-fluoro nucleotide
  modified_base 15: mod_base = OTHER; note = 2'-O-Methyl nucleotide
  modified_base 16: mod_base = OTHER; note = 2'-fluoro nucleotide
  modified_base 17: mod_base = OTHER; note = 2'-O-Methyl nucleotide
  modified_base 18: mod_base = OTHER; note = 2'-fluoro nucleotide
  modified_base 19: mod_base = OTHER; note = 2'-O-Methyl nucleotide
  modified_base 20: mod_base = OTHER; note = deoxy-thymine phosphorothioate
  misc_feature 1..19: note = RNA
  misc_feature 20..21: note = DNA
acgccgacgaggtggcctgtt

SEQ ID NO: 1232 - DNA, 21 bp, synthetic construct
  misc_feature 1..21: note = Description of Artificial Sequence: Synthetic oligonucleotide
  source 1..21: mol_type = other DNA
  modified_base 1: mod_base = OTHER; note = 2'-O-Methyl nucleotide
  modified_base 2: mod_base = OTHER; note = 2'-O-Methyl nucleotide
  modified_base 3: mod_base = OTHER; note = 2'-fluoro nucleotide
  modified_base 4: mod_base = OTHER; note = 2'-O-Methyl nucleotide
  modified_base 5: mod_base = OTHER; note = 2'-fluoro nucleotide
  modified_base 6: mod_base = OTHER; note = 2'-O-Methyl nucleotide
  modified_base 7: mod_base = OTHER; note = 2'-fluoro nucleotide
  modified_base 8: mod_base = OTHER; note = 2'-O-Methyl nucleotide
  modified_base 9: mod_base = OTHER; note = 2'-fluoro nucleotide
  modified_base 10: mod_base = OTHER; note = 2'-O-Methyl nucleotide
  modified_base 11: mod_base = OTHER; note = 2'-fluoro nucleotide
  modified_base 12: mod_base = OTHER; note = 2'-O-Methyl nucleotide
  modified_base 13: mod_base = OTHER; note = 2'-fluoro nucleotide
  modified_base 14: mod_base = OTHER; note = 2'-O-Methyl nucleotide
  modified_base 15: mod_base = OTHER; note = 2'-fluoro nucleotide
  modified_base 16: mod_base = OTHER; note = 2'-O-Methyl nucleotide
  modified_base 17: mod_base = OTHER; note = 2'-fluoro nucleotide
  modified_base 18: mod_base = OTHER; note = 2'-O-Methyl nucleotide
  modified_base 19: mod_base = OTHER; note = 2'-fluoro nucleotide
  modified_base 20: mod_base = OTHER; note = deoxy-thymine phosphorothioate
  misc_feature 1..19: note = RNA
  misc_feature 20..21: note = DNA
aggccacctcgtcggcgtctt

SEQ ID NO: 1233 - DNA, 21 bp, synthetic construct
  misc_feature 1..21: note = Description of Artificial Sequence: Synthetic oligonucleotide
  source 1..21: mol_type = other DNA
  modified_base 1: mod_base = OTHER; note = 2'-fluoro nucleotide
  modified_base 2: mod_base = OTHER; note = 2'-fluoro nucleotide
  modified_base 3: mod_base = OTHER; note = 2'-O-Methyl nucleotide
  modified_base 4: mod_base = OTHER; note = 2'-fluoro nucleotide
  modified_base 5: mod_base = OTHER; note = 2'-O-Methyl nucleotide
  modified_base 6: mod_base = OTHER; note = 2'-fluoro nucleotide
  modified_base 7: mod_base = OTHER; note = 2'-O-Methyl nucleotide
  modified_base 8: mod_base = OTHER; note = 2'-fluoro nucleotide
  modified_base 9: mod_base = OTHER; note = 2'-O-Methyl nucleotide
  modified_base 10: mod_base = OTHER; note = 2'-fluoro nucleotide
  modified_base 11: mod_base = OTHER; note = 2'-O-Methyl nucleotide
  modified_base 12: mod_base = OTHER; note = 2'-fluoro nucleotide
  modified_base 13: mod_base = OTHER; note = 2'-O-Methyl nucleotide
  modified_base 14: mod_base = OTHER; note = 2'-fluoro nucleotide
  modified_base 15: mod_base = OTHER; note = 2'-O-Methyl nucleotide
  modified_base 16: mod_base = OTHER; note = 2'-fluoro nucleotide
  modified_base 17: mod_base = OTHER; note = 2'-O-Methyl nucleotide
  modified_base 18: mod_base = OTHER; note = 2'-fluoro nucleotide
  modified_base 19: mod_base = OTHER; note = 2'-O-Methyl nucleotide
  modified_base 20: mod_base = OTHER; note = deoxy-thymine phosphorothioate
  misc_feature 1..19: note = RNA
  misc_feature 20..21: note = DNA
gacgccgacgaggtggccttt

SEQ ID NO: 1234 - DNA, 21 bp, synthetic construct
  misc_feature 1..21: note = Description of Artificial Sequence: Synthetic oligonucleotide
  source 1..21: mol_type = other DNA
  modified_base 1: mod_base = OTHER; note = 2'-O-Methyl nucleotide
  modified_base 2: mod_base = OTHER; note = 2'-O-Methyl nucleotide
  modified_base 3: mod_base = OTHER; note = 2'-fluoro nucleotide
  modified_base 4: mod_base = OTHER; note = 2'-O-Methyl nucleotide
  modified_base 5: mod_base = OTHER; note = 2'-fluoro nucleotide
  modified_base 6: mod_base = OTHER; note = 2'-O-Methyl nucleotide
  modified_base 7: mod_base = OTHER; note = 2'-fluoro nucleotide
  modified_base 8: mod_base = OTHER; note = 2'-O-Methyl nucleotide
  modified_base 9: mod_base = OTHER; note = 2'-fluoro nucleotide
  modified_base 10: mod_base = OTHER; note = 2'-O-Methyl nucleotide
  modified_base 11: mod_base = OTHER; note = 2'-fluoro nucleotide
  modified_base 12: mod_base = OTHER; note = 2'-O-Methyl nucleotide
  modified_base 13: mod_base = OTHER; note = 2'-fluoro nucleotide
  modified_base 14: mod_base = OTHER; note = 2'-O-Methyl nucleotide
  modified_base 15: mod_base = OTHER; note = 2'-fluoro nucleotide
  modified_base 16: mod_base = OTHER; note = 2'-O-Methyl nucleotide
  modified_base 17: mod_base = OTHER; note = 2'-fluoro nucleotide
  modified_base 18: mod_base = OTHER; note = 2'-O-Methyl nucleotide
  modified_base 19: mod_base = OTHER; note = 2'-fluoro nucleotide
  modified_base 20: mod_base = OTHER; note = deoxy-thymine phosphorothioate
  misc_feature 1..19: note = RNA
  misc_feature 20..21: note = DNA
ggccacctcgtcggcgtcctt

SEQ ID NO: 1235 - DNA, 21 bp, synthetic construct
  misc_feature 1..21: note = Description of Artificial Sequence: Synthetic oligonucleotide
  source 1..21: mol_type = other DNA
  modified_base 1: mod_base = OTHER; note = 2'-fluoro nucleotide
  modified_base 2: mod_base = OTHER; note = 2'-fluoro nucleotide
  modified_base 3: mod_base = OTHER; note = 2'-O-Methyl nucleotide
  modified_base 4: mod_base = OTHER; note = 2'-fluoro nucleotide
  modified_base 5: mod_base = OTHER; note = 2'-O-Methyl nucleotide
  modified_base 6: mod_base = OTHER; note = 2'-fluoro nucleotide
  modified_base 7: mod_base = OTHER; note = 2'-O-Methyl nucleotide
  modified_base 8: mod_base = OTHER; note = 2'-fluoro nucleotide
  modified_base 9: mod_base = OTHER; note = 2'-O-Methyl nucleotide
  modified_base 10: mod_base = OTHER; note = 2'-fluoro nucleotide
  modified_base 11: mod_base = OTHER; note = 2'-O-Methyl nucleotide
  modified_base 12: mod_base = OTHER; note = 2'-fluoro nucleotide
  modified_base 13: mod_base = OTHER; note = 2'-O-Methyl nucleotide
  modified_base 14: mod_base = OTHER; note = 2'-fluoro nucleotide
  modified_base 15: mod_base = OTHER; note = 2'-O-Methyl nucleotide
  modified_base 16: mod_base = OTHER; note = 2'-fluoro nucleotide
  modified_base 17: mod_base = OTHER; note = 2'-O-Methyl nucleotide
  modified_base 18: mod_base = OTHER; note = 2'-fluoro nucleotide
  modified_base 19: mod_base = OTHER; note = 2'-O-Methyl nucleotide
  modified_base 20: mod_base = OTHER; note = deoxy-thymine phosphorothioate
  misc_feature 1..19: note = RNA
  misc_feature 20..21: note = DNA
ggacgccgacgaggtggcctt

SEQ ID NO: 1236 - DNA, 21 bp, synthetic construct
  misc_feature 1..21: note = Description of Artificial Sequence: Synthetic oligonucleotide
  source 1..21: mol_type = other DNA
  modified_base 1: mod_base = OTHER; note = 2'-O-Methyl nucleotide
  modified_base 2: mod_base = OTHER; note = 2'-O-Methyl nucleotide
  modified_base 3: mod_base = OTHER; note = 2'-fluoro nucleotide
  modified_base 4: mod_base = OTHER; note = 2'-O-Methyl nucleotide
  modified_base 5: mod_base = OTHER; note = 2'-fluoro nucleotide
  modified_base 6: mod_base = OTHER; note = 2'-O-Methyl nucleotide
  modified_base 7: mod_base = OTHER; note = 2'-fluoro nucleotide
  modified_base 8: mod_base = OTHER; note = 2'-O-Methyl nucleotide
  modified_base 9: mod_base = OTHER; note = 2'-fluoro nucleotide
  modified_base 10: mod_base = OTHER; note = 2'-O-Methyl nucleotide
  modified_base 11: mod_base = OTHER; note = 2'-fluoro nucleotide
  modified_base 12: mod_base = OTHER; note = 2'-O-Methyl nucleotide
  modified_base 13: mod_base = OTHER; note = 2'-fluoro nucleotide
  modified_base 14: mod_base = OTHER; note = 2'-O-Methyl nucleotide
  modified_base 15: mod_base = OTHER; note = 2'-fluoro nucleotide
  modified_base 16: mod_base = OTHER; note = 2'-O-Methyl nucleotide
  modified_base 17: mod_base = OTHER; note = 2'-fluoro nucleotide
  modified_base 18: mod_base = OTHER; note = 2'-O-Methyl nucleotide
  modified_base 19: mod_base = OTHER; note = 2'-fluoro nucleotide
  modified_base 20: mod_base = OTHER; note = deoxy-thymine phosphorothioate
  misc_feature 1..19: note = RNA
  misc_feature 20..21: note = DNA
gccacctcgtcggcgtccgtt

SEQ ID NO: 1237 - DNA, 21 bp, synthetic construct
  misc_feature 1..21: note = Description of Artificial Sequence: Synthetic oligonucleotide
  source 1..21: mol_type = other DNA
  modified_base 1: mod_base = OTHER; note = 2'-fluoro nucleotide
  modified_base 2: mod_base = OTHER; note = 2'-fluoro nucleotide
  modified_base 3: mod_base = OTHER; note = 2'-O-Methyl nucleotide
  modified_base 4: mod_base = OTHER; note = 2'-fluoro nucleotide
  modified_base 5: mod_base = OTHER; note = 2'-O-Methyl nucleotide
  modified_base 6: mod_base = OTHER; note = 2'-fluoro nucleotide
  modified_base 7: mod_base = OTHER; note = 2'-O-Methyl nucleotide
  modified_base 8: mod_base = OTHER; note = 2'-fluoro nucleotide
  modified_base 9: mod_base = OTHER; note = 2'-O-Methyl nucleotide
  modified_base 10: mod_base = OTHER; note = 2'-fluoro nucleotide
  modified_base 11: mod_base = OTHER; note = 2'-O-Methyl nucleotide
  modified_base 12: mod_base = OTHER; note = 2'-fluoro nucleotide
  modified_base 13: mod_base = OTHER; note = 2'-O-Methyl nucleotide
  modified_base 14: mod_base = OTHER; note = 2'-fluoro nucleotide
  modified_base 15: mod_base = OTHER; note = 2'-O-Methyl nucleotide
  modified_base 16: mod_base = OTHER; note = 2'-fluoro nucleotide
  modified_base 17: mod_base = OTHER; note = 2'-O-Methyl nucleotide
  modified_base 18: mod_base = OTHER; note = 2'-fluoro nucleotide
  modified_base 19: mod_base = OTHER; note = 2'-O-Methyl nucleotide
  modified_base 20: mod_base = OTHER; note = deoxy-thymine phosphorothioate
  misc_feature 1..19: note = RNA
  misc_feature 20..21: note = DNA
cggacgccgacgaggtggctt

SEQ ID NO: 1238 - DNA, 21 bp, synthetic construct
  misc_feature 1..21: note = Description of Artificial Sequence: Synthetic oligonucleotide
  source 1..21: mol_type = other DNA
  modified_base 1: mod_base = OTHER; note = 2'-O-Methyl nucleotide
  modified_base 2: mod_base = OTHER; note = 2'-O-Methyl nucleotide
  modified_base 3: mod_base = OTHER; note = 2'-fluoro nucleotide
  modified_base 4: mod_base = OTHER; note = 2'-O-Methyl nucleotide
  modified_base 5: mod_base = OTHER; note = 2'-fluoro nucleotide
  modified_base 6: mod_base = OTHER; note = 2'-O-Methyl nucleotide
  modified_base 7: mod_base = OTHER; note = 2'-fluoro nucleotide
  modified_base 8: mod_base = OTHER; note = 2'-O-Methyl nucleotide
  modified_base 9: mod_base = OTHER; note = 2'-fluoro nucleotide
  modified_base 10: mod_base = OTHER; note = 2'-O-Methyl nucleotide
  modified_base 11: mod_base = OTHER; note = 2'-fluoro nucleotide
  modified_base 12: mod_base = OTHER; note = 2'-O-Methyl nucleotide
  modified_base 13: mod_base = OTHER; note = 2'-fluoro nucleotide
  modified_base 14: mod_base = OTHER; note = 2'-O-Methyl nucleotide
  modified_base 15: mod_base = OTHER; note = 2'-fluoro nucleotide
  modified_base 16: mod_base = OTHER; note = 2'-O-Methyl nucleotide
  modified_base 17: mod_base = OTHER; note = 2'-fluoro nucleotide
  modified_base 18: mod_base = OTHER; note = 2'-O-Methyl nucleotide
  modified_base 19: mod_base = OTHER; note = 2'-fluoro nucleotide
  modified_base 20: mod_base = OTHER; note = deoxy-thymine phosphorothioate
  misc_feature 1..19: note = RNA
  misc_feature 20..21: note = DNA
ccacctcgtcggcgtccgctt

SEQ ID NO: 1239 - DNA, 21 bp, synthetic construct
  misc_feature 1..21: note = Description of Artificial Sequence: Synthetic oligonucleotide
  source 1..21: mol_type = other DNA
  modified_base 1: mod_base = OTHER; note = 2'-fluoro nucleotide
  modified_base 2: mod_base = OTHER; note = 2'-fluoro nucleotide
  modified_base 3: mod_base = OTHER; note = 2'-O-Methyl nucleotide
  modified_base 4: mod_base = OTHER; note = 2'-fluoro nucleotide
  modified_base 5: mod_base = OTHER; note = 2'-O-Methyl nucleotide
  modified_base 6: mod_base = OTHER; note = 2'-fluoro nucleotide
  modified_base 7: mod_base = OTHER; note = 2'-O-Methyl nucleotide
  modified_base 8: mod_base = OTHER; note = 2'-fluoro nucleotide
  modified_base 9: mod_base = OTHER; note = 2'-O-Methyl nucleotide
  modified_base 10: mod_base = OTHER; note = 2'-fluoro nucleotide
  modified_base 11: mod_base = OTHER; note = 2'-O-Methyl nucleotide
  modified_base 12: mod_base = OTHER; note = 2'-fluoro nucleotide
  modified_base 13: mod_base = OTHER; note = 2'-O-Methyl nucleotide
  modified_base 14: mod_base = OTHER; note = 2'-fluoro nucleotide
  modified_base 15: mod_base = OTHER; note = 2'-O-Methyl nucleotide
  modified_base 16: mod_base = OTHER; note = 2'-fluoro nucleotide
  modified_base 17: mod_base = OTHER; note = 2'-O-Methyl nucleotide
  modified_base 18: mod_base = OTHER; note = 2'-fluoro nucleotide
  modified_base 19: mod_base = OTHER; note = 2'-O-Methyl nucleotide
  modified_base 20: mod_base = OTHER; note = deoxy-thymine phosphorothioate
  misc_feature 1..19: note = RNA
  misc_feature 20..21: note = DNA
gcggacgccgacgaggtggtt

SEQ ID NO: 1240 - DNA, 21 bp, synthetic construct
  misc_feature 1..21: note = Description of Artificial Sequence: Synthetic oligonucleotide
  source 1..21: mol_type = other DNA
  modified_base 1: mod_base = OTHER; note = 2'-O-Methyl nucleotide
  modified_base 2: mod_base = OTHER; note = 2'-O-Methyl nucleotide
  modified_base 3: mod_base = OTHER; note = 2'-fluoro nucleotide
  modified_base 4: mod_base = OTHER; note = 2'-O-Methyl nucleotide
  modified_base 5: mod_base = OTHER; note = 2'-fluoro nucleotide
  modified_base 6: mod_base = OTHER; note = 2'-O-Methyl nucleotide
  modified_base 7: mod_base = OTHER; note = 2'-fluoro nucleotide
  modified_base 8: mod_base = OTHER; note = 2'-O-Methyl nucleotide
  modified_base 9: mod_base = OTHER; note = 2'-fluoro nucleotide
  modified_base 10: mod_base = OTHER; note = 2'-O-Methyl nucleotide
  modified_base 11: mod_base = OTHER; note = 2'-fluoro nucleotide
  modified_base 12: mod_base = OTHER; note = 2'-O-Methyl nucleotide
  modified_base 13: mod_base = OTHER; note = 2'-fluoro nucleotide
  modified_base 14: mod_base = OTHER; note = 2'-O-Methyl nucleotide
  modified_base 15: mod_base = OTHER; note = 2'-fluoro nucleotide
  modified_base 16: mod_base = OTHER; note = 2'-O-Methyl nucleotide
  modified_base 17: mod_base = OTHER; note = 2'-fluoro nucleotide
  modified_base 18: mod_base = OTHER; note = 2'-O-Methyl nucleotide
  modified_base 19: mod_base = OTHER; note = 2'-fluoro nucleotide
  modified_base 20: mod_base = OTHER; note = deoxy-thymine phosphorothioate
  misc_feature 1..19: note = RNA
  misc_feature 20..21: note = DNA
cacctcgtcggcgtccgcctt

SEQ ID NO: 1241 - DNA, 21 bp, synthetic construct
  misc_feature 1..21: note = Description of Artificial Sequence: Synthetic oligonucleotide
  source 1..21: mol_type = other DNA
  modified_base 1: mod_base = OTHER; note = 2'-fluoro nucleotide
  modified_base 2: mod_base = OTHER; note = 2'-fluoro nucleotide
  modified_base 3: mod_base = OTHER; note = 2'-O-Methyl nucleotide
  modified_base 4: mod_base = OTHER; note = 2'-fluoro nucleotide
  modified_base 5: mod_base = OTHER; note = 2'-O-Methyl nucleotide
  modified_base 6: mod_base = OTHER; note = 2'-fluoro nucleotide
  modified_base 7: mod_base = OTHER; note = 2'-O-Methyl nucleotide
  modified_base 8: mod_base = OTHER; note = 2'-fluoro nucleotide
  modified_base 9: mod_base = OTHER; note = 2'-O-Methyl nucleotide
  modified_base 10: mod_base = OTHER; note = 2'-fluoro nucleotide
  modified_base 11: mod_base = OTHER; note = 2'-O-Methyl nucleotide
  modified_base 12: mod_base = OTHER; note = 2'-fluoro nucleotide
  modified_base 13: mod_base = OTHER; note = 2'-O-Methyl nucleotide
  modified_base 14: mod_base = OTHER; note = 2'-fluoro nucleotide
  modified_base 15: mod_base = OTHER; note = 2'-O-Methyl nucleotide
  modified_base 16: mod_base = OTHER; note = 2'-fluoro nucleotide
  modified_base 17: mod_base = OTHER; note = 2'-O-Methyl nucleotide
  modified_base 18: mod_base = OTHER; note = 2'-fluoro nucleotide
  modified_base 19: mod_base = OTHER; note = 2'-O-Methyl nucleotide
  modified_base 20: mod_base = OTHER; note = deoxy-thymine phosphorothioate
  misc_feature 1..19: note = RNA
  misc_feature 20..21: note = DNA
ggcggacgccgacgaggtgtt

SEQ ID NO: 1242 - DNA, 21 bp, synthetic construct
  misc_feature 1..21: note = Description of Artificial Sequence: Synthetic oligonucleotide
  source 1..21: mol_type = other DNA
  modified_base 1: mod_base = OTHER; note = 2'-O-Methyl nucleotide
  modified_base 2: mod_base = OTHER; note = 2'-O-Methyl nucleotide
  modified_base 3: mod_base = OTHER; note = 2'-fluoro nucleotide
  modified_base 4: mod_base = OTHER; note = 2'-O-Methyl nucleotide
  modified_base 5: mod_base = OTHER; note = 2'-fluoro nucleotide
  modified_base 6: mod_base = OTHER; note = 2'-O-Methyl nucleotide
  modified_base 7: mod_base = OTHER; note = 2'-fluoro nucleotide
  modified_base 8: mod_base = OTHER; note = 2'-O-Methyl nucleotide
  modified_base 9: mod_base = OTHER; note = 2'-fluoro nucleotide
  modified_base 10: mod_base = OTHER; note = 2'-O-Methyl nucleotide
  modified_base 11: mod_base = OTHER; note = 2'-fluoro nucleotide
  modified_base 12: mod_base = OTHER; note = 2'-O-Methyl nucleotide
  modified_base 13: mod_base = OTHER; note = 2'-fluoro nucleotide
  modified_base 14: mod_base = OTHER; note = 2'-O-Methyl nucleotide
  modified_base 15: mod_base = OTHER; note = 2'-fluoro nucleotide
  modified_base 16: mod_base = OTHER; note = 2'-O-Methyl nucleotide
  modified_base 17: mod_base = OTHER; note = 2'-fluoro nucleotide
  modified_base 18: mod_base = OTHER; note = 2'-O-Methyl nucleotide
  modified_base 19: mod_base = OTHER; note = 2'-fluoro nucleotide
  modified_base 20: mod_base = OTHER; note = deoxy-thymine phosphorothioate
  misc_feature 1..19: note = RNA
  misc_feature 20..21: note = DNA
acctcgtcggcgtccgccctt

SEQ ID NO: 1243 - DNA, 21 bp, synthetic construct
  misc_feature 1..21: note = Description of Artificial Sequence: Synthetic oligonucleotide
  source 1..21: mol_type = other DNA
  modified_base 1: mod_base = OTHER; note = 2'-fluoro nucleotide
  modified_base 2: mod_base = OTHER; note = 2'-fluoro nucleotide
  modified_base 3: mod_base = OTHER; note = 2'-O-Methyl nucleotide
  modified_base 4: mod_base = OTHER; note = 2'-fluoro nucleotide
  modified_base 5: mod_base = OTHER; note = 2'-O-Methyl nucleotide
  modified_base 6: mod_base = OTHER; note = 2'-fluoro nucleotide
  modified_base 7: mod_base = OTHER; note = 2'-O-Methyl nucleotide
  modified_base 8: mod_base = OTHER; note = 2'-fluoro nucleotide
  modified_base 9: mod_base = OTHER; note = 2'-O-Methyl nucleotide
  modified_base 10: mod_base = OTHER; note = 2'-fluoro nucleotide
  modified_base 11: mod_base = OTHER; note = 2'-O-Methyl nucleotide
  modified_base 12: mod_base = OTHER; note = 2'-fluoro nucleotide
  modified_base 13: mod_base = OTHER; note = 2'-O-Methyl nucleotide
  modified_base 14: mod_base = OTHER; note = 2'-fluoro nucleotide
  modified_base 15: mod_base = OTHER; note = 2'-O-Methyl nucleotide
  modified_base 16: mod_base = OTHER; note = 2'-fluoro nucleotide
  modified_base 17: mod_base = OTHER; note = 2'-O-Methyl nucleotide
  modified_base 18: mod_base = OTHER; note = 2'-fluoro nucleotide
  modified_base 19: mod_base = OTHER; note = 2'-O-Methyl nucleotide
  modified_base 20: mod_base = OTHER; note = deoxy-thymine phosphorothioate
  misc_feature 1..19: note = RNA
  misc_feature 20..21: note = DNA
gggcggacgccgacgaggttt

SEQ ID NO: 1244 - DNA, 21 bp, synthetic construct
  misc_feature 1..21: note = Description of Artificial Sequence: Synthetic oligonucleotide
  source 1..21: mol_type = other DNA
  modified_base 1: mod_base = OTHER; note = 2'-O-Methyl nucleotide
  modified_base 2: mod_base = OTHER; note = 2'-O-Methyl nucleotide
  modified_base 3: mod_base = OTHER; note = 2'-fluoro nucleotide
  modified_base 4: mod_base = OTHER; note = 2'-O-Methyl nucleotide
  modified_base 5: mod_base = OTHER; note = 2'-fluoro nucleotide
  modified_base 6: mod_base = OTHER; note = 2'-O-Methyl nucleotide
  modified_base 7: mod_base = OTHER; note = 2'-fluoro nucleotide
  modified_base 8: mod_base = OTHER; note = 2'-O-Methyl nucleotide
  modified_base 9: mod_base = OTHER; note = 2'-fluoro nucleotide
  modified_base 10: mod_base = OTHER; note = 2'-O-Methyl nucleotide
  modified_base 11: mod_base = OTHER; note = 2'-fluoro nucleotide
  modified_base 12: mod_base = OTHER; note = 2'-O-Methyl nucleotide
  modified_base 13: mod_base = OTHER; note = 2'-fluoro nucleotide
  modified_base 14: mod_base = OTHER; note = 2'-O-Methyl nucleotide
  modified_base 15: mod_base = OTHER; note = 2'-fluoro nucleotide
  modified_base 16: mod_base = OTHER; note = 2'-O-Methyl nucleotide
  modified_base 17: mod_base = OTHER; note = 2'-fluoro nucleotide
  modified_base 18: mod_base = OTHER; note = 2'-O-Methyl nucleotide
  modified_base 19: mod_base = OTHER; note = 2'-fluoro nucleotide
  modified_base 20: mod_base = OTHER; note = deoxy-thymine phosphorothioate
  misc_feature 1..19: note = RNA
  misc_feature 20..21: note = DNA
cctcgtcggcgtccgcccgtt

SEQ ID NO: 1245 - DNA, 21 bp, synthetic construct
  misc_feature 1..21: note = Description of Artificial Sequence: Synthetic oligonucleotide
  source 1..21: mol_type = other DNA
  modified_base 1: mod_base = OTHER; note = 2'-fluoro nucleotide
  modified_base 2: mod_base = OTHER; note = 2'-fluoro nucleotide
  modified_base 3: mod_base = OTHER; note = 2'-O-Methyl nucleotide
  modified_base 4: mod_base = OTHER; note = 2'-fluoro nucleotide
  modified_base 5: mod_base = OTHER; note = 2'-O-Methyl nucleotide
  modified_base 6: mod_base = OTHER; note = 2'-fluoro nucleotide
  modified_base 7: mod_base = OTHER; note = 2'-O-Methyl nucleotide
  modified_base 8: mod_base = OTHER; note = 2'-fluoro nucleotide
  modified_base 9: mod_base = OTHER; note = 2'-O-Methyl nucleotide
  modified_base 10: mod_base = OTHER; note = 2'-fluoro nucleotide
  modified_base 11: mod_base = OTHER; note = 2'-O-Methyl nucleotide
  modified_base 12: mod_base = OTHER; note = 2'-fluoro nucleotide
  modified_base 13: mod_base = OTHER; note = 2'-O-Methyl nucleotide
  modified_base 14: mod_base = OTHER; note = 2'-fluoro nucleotide
  modified_base 15: mod_base = OTHER; note = 2'-O-Methyl nucleotide
  modified_base 16: mod_base = OTHER; note = 2'-fluoro nucleotide
  modified_base 17: mod_base = OTHER; note = 2'-O-Methyl nucleotide
  modified_base 18: mod_base = OTHER; note = 2'-fluoro nucleotide
  modified_base 19: mod_base = OTHER; note = 2'-O-Methyl nucleotide
  modified_base 20: mod_base = OTHER; note = deoxy-thymine phosphorothioate
  misc_feature 1..19: note = RNA
  misc_feature 20..21: note = DNA
cgggcggacgccgacgaggtt

SEQ ID NO: 1246 - DNA, 21 bp, synthetic construct
  misc_feature 1..21: note = Description of Artificial Sequence: Synthetic oligonucleotide
  source 1..21: mol_type = other DNA
  modified_base 1: mod_base = OTHER; note = 2'-O-Methyl nucleotide
  modified_base 2: mod_base = OTHER; note = 2'-O-Methyl nucleotide
  modified_base 3: mod_base = OTHER; note = 2'-fluoro nucleotide
  modified_base 4: mod_base = OTHER; note = 2'-O-Methyl nucleotide
  modified_base 5: mod_base = OTHER; note = 2'-fluoro nucleotide
  modified_base 6: mod_base = OTHER; note = 2'-O-Methyl nucleotide
  modified_base 7: mod_base = OTHER; note = 2'-fluoro nucleotide
  modified_base 8: mod_base = OTHER; note = 2'-O-Methyl nucleotide
  modified_base 9: mod_base = OTHER; note = 2'-fluoro nucleotide
  modified_base 10: mod_base = OTHER; note = 2'-O-Methyl nucleotide
  modified_base 11: mod_base = OTHER; note = 2'-fluoro nucleotide
  modified_base 12: mod_base = OTHER; note = 2'-O-Methyl nucleotide
  modified_base 13: mod_base = OTHER; note = 2'-fluoro nucleotide
  modified_base 14: mod_base = OTHER; note = 2'-O-Methyl nucleotide
  modified_base 15: mod_base = OTHER; note = 2'-fluoro nucleotide
  modified_base 16: mod_base = OTHER; note = 2'-O-Methyl nucleotide
  modified_base 17: mod_base = OTHER; note = 2'-fluoro nucleotide
  modified_base 18: mod_base = OTHER; note = 2'-O-Methyl nucleotide
  modified_base 19: mod_base = OTHER; note = 2'-fluoro nucleotide
  modified_base 20: mod_base = OTHER; note = deoxy-thymine phosphorothioate
  misc_feature 1..19: note = RNA
  misc_feature 20..21: note = DNA
ctcgtcggcgtccgcccgatt

SEQ ID NO: 1247 - DNA, 21 bp, synthetic construct
  misc_feature 1..21: note = Description of Artificial Sequence: Synthetic oligonucleotide
  source 1..21: mol_type = other DNA
  modified_base 1: mod_base = OTHER; note = 2'-fluoro nucleotide
  modified_base 2: mod_base = OTHER; note = 2'-fluoro nucleotide
  modified_base 3: mod_base = OTHER; note = 2'-O-Methyl nucleotide
  modified_base 4: mod_base = OTHER; note = 2'-fluoro nucleotide
  modified_base 5: mod_base = OTHER; note = 2'-O-Methyl nucleotide
  modified_base 6: mod_base = OTHER; note = 2'-fluoro nucleotide
  modified_base 7: mod_base = OTHER; note = 2'-O-Methyl nucleotide
  modified_base 8: mod_base = OTHER; note = 2'-fluoro nucleotide
  modified_base 9: mod_base = OTHER; note = 2'-O-Methyl nucleotide
  modified_base 10: mod_base = OTHER; note = 2'-fluoro nucleotide
  modified_base 11: mod_base = OTHER; note = 2'-O-Methyl nucleotide
  modified_base 12: mod_base = OTHER; note = 2'-fluoro nucleotide
  modified_base 13: mod_base = OTHER; note = 2'-O-Methyl nucleotide
  modified_base 14: mod_base = OTHER; note = 2'-fluoro nucleotide
  modified_base 15: mod_base = OTHER; note = 2'-O-Methyl nucleotide
  modified_base 16: mod_base = OTHER; note = 2'-fluoro nucleotide
  modified_base 17: mod_base = OTHER; note = 2'-O-Methyl nucleotide
  modified_base 18: mod_base = OTHER; note = 2'-fluoro nucleotide
  modified_base 19: mod_base = OTHER; note = 2'-O-Methyl nucleotide
  modified_base 20: mod_base = OTHER; note = deoxy-thymine phosphorothioate
  misc_feature 1..19: note = RNA
  misc_feature 20..21: note = DNA
tcgggcggacgccgacgagtt

SEQ ID NO: 1248 - DNA, 21 bp, synthetic construct
  misc_feature 1..21: note = Description of Artificial Sequence: Synthetic oligonucleotide
  source 1..21: mol_type = other DNA
  modified_base 1: mod_base = OTHER; note = 2'-O-Methyl nucleotide
  modified_base 2: mod_base = OTHER; note = 2'-O-Methyl nucleotide
  modified_base 3: mod_base = OTHER; note = 2'-fluoro nucleotide
  modified_base 4: mod_base = OTHER; note = 2'-O-Methyl nucleotide
  modified_base 5: mod_base = OTHER; note = 2'-fluoro nucleotide
  modified_base 6: mod_base = OTHER; note = 2'-O-Methyl nucleotide
  modified_base 7: mod_base = OTHER; note = 2'-fluoro nucleotide
  modified_base 8: mod_base = OTHER; note = 2'-O-Methyl nucleotide
  modified_base 9: mod_base = OTHER; note = 2'-fluoro nucleotide
  modified_base 10: mod_base = OTHER; note = 2'-O-Methyl nucleotide
  modified_base 11: mod_base = OTHER; note = 2'-fluoro nucleotide
  modified_base 12: mod_base = OTHER; note = 2'-O-Methyl nucleotide
  modified_base 13: mod_base = OTHER; note = 2'-fluoro nucleotide
  modified_base 14: mod_base = OTHER; note = 2'-O-Methyl nucleotide
  modified_base 15: mod_base = OTHER; note = 2'-fluoro nucleotide
  modified_base 16: mod_base = OTHER; note = 2'-O-Methyl nucleotide
  modified_base 17: mod_base = OTHER; note = 2'-fluoro nucleotide
  modified_base 18: mod_base = OTHER; note = 2'-O-Methyl nucleotide
  modified_base 19: mod_base = OTHER; note = 2'-fluoro nucleotide
  modified_base 20: mod_base = OTHER; note = deoxy-thymine phosphorothioate
  misc_feature 1..19: note = RNA
  misc_feature 20..21: note = DNA
tcgtcggcgtccgcccgagtt

SEQ ID NO: 1249 - DNA, 21 bp, synthetic construct
  misc_feature 1..21: note = Description of Artificial Sequence: Synthetic oligonucleotide
  source 1..21: mol_type = other DNA
  modified_base 1: mod_base = OTHER; note = 2'-fluoro nucleotide
  modified_base 2: mod_base = OTHER; note = 2'-fluoro nucleotide
  modified_base 3: mod_base = OTHER; note = 2'-O-Methyl nucleotide
  modified_base 4: mod_base = OTHER; note = 2'-fluoro nucleotide
  modified_base 5: mod_base = OTHER; note = 2'-O-Methyl nucleotide
  modified_base 6: mod_base = OTHER; note = 2'-fluoro nucleotide
  modified_base 7: mod_base = OTHER; note = 2'-O-Methyl nucleotide
  modified_base 8: mod_base = OTHER; note = 2'-fluoro nucleotide
  modified_base 9: mod_base = OTHER; note = 2'-O-Methyl nucleotide
  modified_base 10: mod_base = OTHER; note = 2'-fluoro nucleotide
  modified_base 11: mod_base = OTHER; note = 2'-O-Methyl nucleotide
  modified_base 12: mod_base = OTHER; note = 2'-fluoro nucleotide
  modified_base 13: mod_base = OTHER; note = 2'-O-Methyl nucleotide
  modified_base 14: mod_base = OTHER; note = 2'-fluoro nucleotide
  modified_base 15: mod_base = OTHER; note = 2'-O-Methyl nucleotide
  modified_base 16: mod_base = OTHER; note = 2'-fluoro nucleotide
  modified_base 17: mod_base = OTHER; note = 2'-O-Methyl nucleotide
  modified_base 18: mod_base = OTHER; note = 2'-fluoro nucleotide
  modified_base 19: mod_base = OTHER; note = 2'-O-Methyl nucleotide
  modified_base 20: mod_base = OTHER; note = deoxy-thymine phosphorothioate
  misc_feature 1..19: note = RNA
  misc_feature 20..21: note = DNA
ctcgggcggacgccgacgatt

SEQ ID NO: 1250 - DNA, 21 bp, synthetic construct
  misc_feature 1..21: note = Description of Artificial Sequence: Synthetic oligonucleotide
  source 1..21: mol_type = other DNA
  modified_base 1: mod_base = OTHER; note = 2'-O-Methyl nucleotide
  modified_base 2: mod_base = OTHER; note = 2'-O-Methyl nucleotide
  modified_base 3: mod_base = OTHER; note = 2'-fluoro nucleotide
  modified_base 4: mod_base = OTHER; note = 2'-O-Methyl nucleotide
  modified_base 5: mod_base = OTHER; note = 2'-fluoro nucleotide
  modified_base 6: mod_base = OTHER; note = 2'-O-Methyl nucleotide
  modified_base 7: mod_base = OTHER; note = 2'-fluoro nucleotide
  modified_base 8: mod_base = OTHER; note = 2'-O-Methyl nucleotide
  modified_base 9: mod_base = OTHER; note = 2'-fluoro nucleotide
  modified_base 10: mod_base = OTHER; note = 2'-O-Methyl nucleotide
  modified_base 11: mod_base = OTHER; note = 2'-fluoro nucleotide
  modified_base 12: mod_base = OTHER; note = 2'-O-Methyl nucleotide
  modified_base 13: mod_base = OTHER; note = 2'-fluoro nucleotide
  modified_base 14: mod_base = OTHER; note = 2'-O-Methyl nucleotide
  modified_base 15: mod_base = OTHER; note = 2'-fluoro nucleotide
  modified_base 16: mod_base = OTHER; note = 2'-O-Methyl nucleotide
  modified_base 17: mod_base = OTHER; note = 2'-fluoro nucleotide
  modified_base 18: mod_base = OTHER; note = 2'-O-Methyl nucleotide
  modified_base 19: mod_base = OTHER; note = 2'-fluoro nucleotide
  modified_base 20: mod_base = OTHER; note = deoxy-thymine phosphorothioate
  misc_feature 1..19: note = RNA
  misc_feature 20..21: note = DNA
cgtcggcgtccgcccgagttt

SEQ ID NO: 1251 - DNA, 21 bp, synthetic construct
  misc_feature 1..21: note = Description of Artificial Sequence: Synthetic oligonucleotide
  source 1..21: mol_type = other DNA
  modified_base 1: mod_base = OTHER; note = 2'-fluoro nucleotide
  modified_base 2: mod_base = OTHER; note = 2'-fluoro nucleotide
  modified_base 3: mod_base = OTHER; note = 2'-O-Methyl nucleotide
  modified_base 4: mod_base = OTHER; note = 2'-fluoro nucleotide
  modified_base 5: mod_base = OTHER; note = 2'-O-Methyl nucleotide
  modified_base 6: mod_base = OTHER; note = 2'-fluoro nucleotide
  modified_base 7: mod_base = OTHER; note = 2'-O-Methyl nucleotide
  modified_base 8: mod_base = OTHER; note = 2'-fluoro nucleotide
  modified_base 9: mod_base = OTHER; note = 2'-O-Methyl nucleotide
  modified_base 10: mod_base = OTHER; note = 2'-fluoro nucleotide
  modified_base 11: mod_base = OTHER; note = 2'-O-Methyl nucleotide
  modified_base 12: mod_base = OTHER; note = 2'-fluoro nucleotide
  modified_base 13: mod_base = OTHER; note = 2'-O-Methyl nucleotide
  modified_base 14: mod_base = OTHER; note = 2'-fluoro nucleotide
  modified_base 15: mod_base = OTHER; note = 2'-O-Methyl nucleotide
  modified_base 16: mod_base = OTHER; note = 2'-fluoro nucleotide
  modified_base 17: mod_base = OTHER; note = 2'-O-Methyl nucleotide
  modified_base 18: mod_base = OTHER; note = 2'-fluoro nucleotide
  modified_base 19: mod_base = OTHER; note = 2'-O-Methyl nucleotide
  modified_base 20: mod_base = OTHER; note = deoxy-thymine phosphorothioate
  misc_feature 1..19: note = RNA
  misc_feature 20..21: note = DNA
actcgggcggacgccgacgtt

SEQ ID NO: 1252 - DNA, 21 bp, synthetic construct
  misc_feature 1..21: note = Description of Artificial Sequence: Synthetic oligonucleotide
  source 1..21: mol_type = other DNA
  modified_base 1: mod_base = OTHER; note = 2'-O-Methyl nucleotide
  modified_base 2: mod_base = OTHER; note = 2'-O-Methyl nucleotide
  modified_base 3: mod_base = OTHER; note = 2'-fluoro nucleotide
  modified_base 4: mod_base = OTHER; note = 2'-O-Methyl nucleotide
  modified_base 5: mod_base = OTHER; note = 2'-fluoro nucleotide
  modified_base 6: mod_base = OTHER; note = 2'-O-Methyl nucleotide
  modified_base 7: mod_base = OTHER; note = 2'-fluoro nucleotide
  modified_base 8: mod_base = OTHER; note = 2'-O-Methyl nucleotide
  modified_base 9: mod_base = OTHER; note = 2'-fluoro nucleotide
  modified_base 10: mod_base = OTHER; note = 2'-O-Methyl nucleotide
  modified_base 11: mod_base = OTHER; note = 2'-fluoro nucleotide
  modified_base 12: mod_base = OTHER; note = 2'-O-Methyl nucleotide
  modified_base 13: mod_base = OTHER; note = 2'-fluoro nucleotide
  modified_base 14: mod_base = OTHER; note = 2'-O-Methyl nucleotide
  modified_base 15: mod_base = OTHER; note = 2'-fluoro nucleotide
  modified_base 16: mod_base = OTHER; note = 2'-O-Methyl nucleotide
  modified_base 17: mod_base = OTHER; note = 2'-fluoro nucleotide
  modified_base 18: mod_base = OTHER; note = 2'-O-Methyl nucleotide
  modified_base 19: mod_base = OTHER; note = 2'-fluoro nucleotide
  modified_base 20: mod_base = OTHER; note = deoxy-thymine phosphorothioate
  misc_feature 1..19: note = RNA
  misc_feature 20..21: note = DNA
gtcggcgtccgcccgagtctt

SEQ ID NO: 1253 - DNA, 21 bp, synthetic construct
  misc_feature 1..21: note = Description of Artificial Sequence: Synthetic oligonucleotide
  source 1..21: mol_type = other DNA
  modified_base 1: mod_base = OTHER; note = 2'-fluoro nucleotide
  modified_base 2: mod_base = OTHER; note = 2'-fluoro nucleotide
  modified_base 3: mod_base = OTHER; note = 2'-O-Methyl nucleotide
  modified_base 4: mod_base = OTHER; note = 2'-fluoro nucleotide
  modified_base 5: mod_base = OTHER; note = 2'-O-Methyl nucleotide
  modified_base 6: mod_base = OTHER; note = 2'-fluoro nucleotide
  modified_base 7: mod_base = OTHER; note = 2'-O-Methyl nucleotide
  modified_base 8: mod_base = OTHER; note = 2'-fluoro nucleotide
  modified_base 9: mod_base = OTHER; note = 2'-O-Methyl nucleotide
  modified_base 10: mod_base = OTHER; note = 2'-fluoro nucleotide
  modified_base 11: mod_base = OTHER; note = 2'-O-Methyl nucleotide
  modified_base 12: mod_base = OTHER; note = 2'-fluoro nucleotide
  modified_base 13: mod_base = OTHER; note = 2'-O-Methyl nucleotide
  modified_base 14: mod_base = OTHER; note = 2'-fluoro nucleotide
  modified_base 15: mod_base = OTHER; note = 2'-O-Methyl nucleotide
  modified_base 16: mod_base = OTHER; note = 2'-fluoro nucleotide
  modified_base 17: mod_base = OTHER; note = 2'-O-Methyl nucleotide
  modified_base 18: mod_base = OTHER; note = 2'-fluoro nucleotide
  modified_base 19: mod_base = OTHER; note = 2'-O-Methyl nucleotide
  modified_base 20: mod_base = OTHER; note = deoxy-thymine phosphorothioate
  misc_feature 1..19: note = RNA
  misc_feature 20..21: note = DNA
gactcgggcggacgccgactt

SEQ ID NO: 1254 - DNA, 21 bp, synthetic construct
  misc_feature 1..21: note = Description of Artificial Sequence: Synthetic oligonucleotide
  source 1..21: mol_type = other DNA
  modified_base 1: mod_base = OTHER; note = 2'-O-Methyl nucleotide
  modified_base 2: mod_base = OTHER; note = 2'-O-Methyl nucleotide
  modified_base 3: mod_base = OTHER; note = 2'-fluoro nucleotide
  modified_base 4: mod_base = OTHER; note = 2'-O-Methyl nucleotide
  modified_base 5: mod_base = OTHER; note = 2'-fluoro nucleotide
  modified_base 6: mod_base = OTHER; note = 2'-O-Methyl nucleotide
  modified_base 7: mod_base = OTHER; note = 2'-fluoro nucleotide
  modified_base 8: mod_base = OTHER; note = 2'-O-Methyl nucleotide
  modified_base 9: mod_base = OTHER; note = 2'-fluoro nucleotide
  modified_base 10: mod_base = OTHER; note = 2'-O-Methyl nucleotide
  modified_base 11: mod_base = OTHER; note = 2'-fluoro nucleotide
  modified_base 12: mod_base = OTHER; note = 2'-O-Methyl nucleotide
  modified_base 13: mod_base = OTHER; note = 2'-fluoro nucleotide
  modified_base 14: mod_base = OTHER; note = 2'-O-Methyl nucleotide
  modified_base 15: mod_base = OTHER; note = 2'-fluoro nucleotide
  modified_base 16: mod_base = OTHER; note = 2'-O-Methyl nucleotide
  modified_base 17: mod_base = OTHER; note = 2'-fluoro nucleotide
  modified_base 18: mod_base = OTHER; note = 2'-O-Methyl nucleotide
  modified_base 19: mod_base = OTHER; note = 2'-fluoro nucleotide
  modified_base 20: mod_base = OTHER; note = deoxy-thymine phosphorothioate
  misc_feature 1..19: note = RNA
  misc_feature 20..21: note = DNA
tcggcgtccgcccgagtcctt

SEQ ID NO: 1255 - DNA, 21 bp, synthetic construct
  misc_feature 1..21: note = Description of Artificial Sequence: Synthetic oligonucleotide
  source 1..21: mol_type = other DNA
  modified_base 1: mod_base = OTHER; note = 2'-fluoro nucleotide
  modified_base 2: mod_base = OTHER; note = 2'-fluoro nucleotide
  modified_base 3: mod_base = OTHER; note = 2'-O-Methyl nucleotide
  modified_base 4: mod_base = OTHER; note = 2'-fluoro nucleotide
  modified_base 5: mod_base = OTHER; note = 2'-O-Methyl nucleotide
  modified_base 6: mod_base = OTHER; note = 2'-fluoro nucleotide
  modified_base 7: mod_base = OTHER; note = 2'-O-Methyl nucleotide
  modified_base 8: mod_base = OTHER; note = 2'-fluoro nucleotide
  modified_base 9: mod_base = OTHER; note = 2'-O-Methyl nucleotide
  modified_base 10: mod_base = OTHER; note = 2'-fluoro nucleotide
  modified_base 11: mod_base = OTHER; note = 2'-O-Methyl nucleotide
  modified_base 12: mod_base = OTHER; note = 2'-fluoro nucleotide
  modified_base 13: mod_base = OTHER; note = 2'-O-Methyl nucleotide
  modified_base 14: mod_base = OTHER; note = 2'-fluoro nucleotide
  modified_base 15: mod_base = OTHER; note = 2'-O-Methyl nucleotide
  modified_base 16: mod_base = OTHER; note = 2'-fluoro nucleotide
  modified_base 17: mod_base = OTHER; note = 2'-O-Methyl nucleotide
  modified_base 18: mod_base = OTHER; note = 2'-fluoro nucleotide
  modified_base 19: mod_base = OTHER; note = 2'-O-Methyl nucleotide
  modified_base 20: mod_base = OTHER; note = deoxy-thymine phosphorothioate
  misc_feature 1..19: note = RNA
  misc_feature 20..21: note = DNA
ggactcgggcggacgccgatt

SEQ ID NO: 1256 - DNA, 21 bp, synthetic construct
  misc_feature 1..21: note = Description of Artificial Sequence: Synthetic oligonucleotide
  source 1..21: mol_type = other DNA
  modified_base 1: mod_base = OTHER; note = 2'-O-Methyl nucleotide
  modified_base 2: mod_base = OTHER; note = 2'-O-Methyl nucleotide
  modified_base 3: mod_base = OTHER; note = 2'-fluoro nucleotide
  modified_base 4: mod_base = OTHER; note = 2'-O-Methyl nucleotide
  modified_base 5: mod_base = OTHER; note = 2'-fluoro nucleotide
  modified_base 6: mod_base = OTHER; note = 2'-O-Methyl nucleotide
  modified_base 7: mod_base = OTHER; note = 2'-fluoro nucleotide
  modified_base 8: mod_base = OTHER; note = 2'-O-Methyl nucleotide
  modified_base 9: mod_base = OTHER; note = 2'-fluoro nucleotide
  modified_base 10: mod_base = OTHER; note = 2'-O-Methyl nucleotide
  modified_base 11: mod_base = OTHER; note = 2'-fluoro nucleotide
  modified_base 12: mod_base = OTHER; note = 2'-O-Methyl nucleotide
  modified_base 13: mod_base = OTHER; note = 2'-fluoro nucleotide
  modified_base 14: mod_base = OTHER; note = 2'-O-Methyl nucleotide
  modified_base 15: mod_base = OTHER; note = 2'-fluoro nucleotide
  modified_base 16: mod_base = OTHER; note = 2'-O-Methyl nucleotide
  modified_base 17: mod_base = OTHER; note = 2'-fluoro nucleotide
  modified_base 18: mod_base = OTHER; note = 2'-O-Methyl nucleotide
  modified_base 19: mod_base = OTHER; note = 2'-fluoro nucleotide
  modified_base 20: mod_base = OTHER; note = deoxy-thymine phosphorothioate
  misc_feature 1..19: note = RNA
  misc_feature 20..21: note = DNA
gcgtccgcccgagtccccgtt

SEQ ID NO: 1257 - DNA, 21 bp, synthetic construct
  misc_feature 1..21: note = Description of Artificial Sequence: Synthetic oligonucleotide
  source 1..21: mol_type = other DNA
  modified_base 1: mod_base = OTHER; note = 2'-fluoro nucleotide
  modified_base 2: mod_base = OTHER; note = 2'-fluoro nucleotide
  modified_base 3: mod_base = OTHER; note = 2'-O-Methyl nucleotide
  modified_base 4: mod_base = OTHER; note = 2'-fluoro nucleotide
  modified_base 5: mod_base = OTHER; note = 2'-O-Methyl nucleotide
  modified_base 6: mod_base = OTHER; note = 2'-fluoro nucleotide
  modified_base 7: mod_base = OTHER; note = 2'-O-Methyl nucleotide
  modified_base 8: mod_base = OTHER; note = 2'-fluoro nucleotide
  modified_base 9: mod_base = OTHER; note = 2'-O-Methyl nucleotide
  modified_base 10: mod_base = OTHER; note = 2'-fluoro nucleotide
  modified_base 11: mod_base = OTHER; note = 2'-O-Methyl nucleotide
  modified_base 12: mod_base = OTHER; note = 2'-fluoro nucleotide
  modified_base 13: mod_base = OTHER; note = 2'-O-Methyl nucleotide
  modified_base 14: mod_base = OTHER; note = 2'-fluoro nucleotide
  modified_base 15: mod_base = OTHER; note = 2'-O-Methyl nucleotide
  modified_base 16: mod_base = OTHER; note = 2'-fluoro nucleotide
  modified_base 17: mod_base = OTHER; note = 2'-O-Methyl nucleotide
  modified_base 18: mod_base = OTHER; note = 2'-fluoro nucleotide
  modified_base 19: mod_base = OTHER; note = 2'-O-Methyl nucleotide
  modified_base 20: mod_base = OTHER; note = deoxy-thymine phosphorothioate
  misc_feature 1..19: note = RNA
  misc_feature 20..21: note = DNA
cggggactcgggcggacgctt

SEQ ID NO: 1258 - DNA, 21 bp, synthetic construct
  misc_feature 1..21: note = Description of Artificial Sequence: Synthetic oligonucleotide
  source 1..21: mol_type = other DNA
  modified_base 1: mod_base = OTHER; note = 2'-O-Methyl nucleotide
  modified_base 2: mod_base = OTHER; note = 2'-O-Methyl nucleotide
  modified_base 3: mod_base = OTHER; note = 2'-fluoro nucleotide
  modified_base 4: mod_base = OTHER; note = 2'-O-Methyl nucleotide
  modified_base 5: mod_base = OTHER; note = 2'-fluoro nucleotide
  modified_base 6: mod_base = OTHER; note = 2'-O-Methyl nucleotide
  modified_base 7: mod_base = OTHER; note = 2'-fluoro nucleotide
  modified_base 8: mod_base = OTHER; note = 2'-O-Methyl nucleotide
  modified_base 9: mod_base = OTHER; note = 2'-fluoro nucleotide
  modified_base 10: mod_base = OTHER; note = 2'-O-Methyl nucleotide
  modified_base 11: mod_base = OTHER; note = 2'-fluoro nucleotide
  modified_base 12: mod_base = OTHER; note = 2'-O-Methyl nucleotide
  modified_base 13: mod_base = OTHER; note = 2'-fluoro nucleotide
  modified_base 14: mod_base = OTHER; note = 2'-O-Methyl nucleotide
  modified_base 15: mod_base = OTHER; note = 2'-fluoro nucleotide
  modified_base 16: mod_base = OTHER; note = 2'-O-Methyl nucleotide
  modified_base 17: mod_base = OTHER; note = 2'-fluoro nucleotide
  modified_base 18: mod_base = OTHER; note = 2'-O-Methyl nucleotide
  modified_base 19: mod_base = OTHER; note = 2'-fluoro nucleotide
  modified_base 20: mod_base = OTHER; note = deoxy-thymine phosphorothioate
  misc_feature 1..19: note = RNA
  misc_feature 20..21: note = DNA
cgtccgcccgagtccccgctt

SEQ ID NO: 1259 - DNA, 21 bp, synthetic construct
  misc_feature 1..21: note = Description of Artificial Sequence: Synthetic oligonucleotide
  source 1..21: mol_type = other DNA
  modified_base 1: mod_base = OTHER; note = 2'-fluoro nucleotide
  modified_base 2: mod_base = OTHER; note = 2'-fluoro nucleotide
  modified_base 3: mod_base = OTHER; note = 2'-O-Methyl nucleotide
  modified_base 4: mod_base = OTHER; note = 2'-fluoro nucleotide
  modified_base 5: mod_base = OTHER; note = 2'-O-Methyl nucleotide
  modified_base 6: mod_base = OTHER; note = 2'-fluoro nucleotide
  modified_base 7: mod_base = OTHER; note = 2'-O-Methyl nucleotide
  modified_base 8: mod_base = OTHER; note = 2'-fluoro nucleotide
  modified_base 9: mod_base = OTHER; note = 2'-O-Methyl nucleotide
  modified_base 10: mod_base = OTHER; note = 2'-fluoro nucleotide
  modified_base 11: mod_base = OTHER; note = 2'-O-Methyl nucleotide
  modified_base 12: mod_base = OTHER; note = 2'-fluoro nucleotide
  modified_base 13: mod_base = OTHER; note = 2'-O-Methyl nucleotide
  modified_base 14: mod_base = OTHER; note = 2'-fluoro nucleotide
  modified_base 15: mod_base = OTHER; note = 2'-O-Methyl nucleotide
  modified_base 16: mod_base = OTHER; note = 2'-fluoro nucleotide
  modified_base 17: mod_base = OTHER; note = 2'-O-Methyl nucleotide
  modified_base 18: mod_base = OTHER; note = 2'-fluoro nucleotide
  modified_base 19: mod_base = OTHER; note = 2'-O-Methyl nucleotide
  modified_base 20: mod_base = OTHER; note = deoxy-thymine phosphorothioate
  misc_feature 1..19: note = RNA
  misc_feature 20..21: note = DNA
gcggggactcgggcggacgtt

SEQ ID NO: 1260 - DNA, 21 bp, synthetic construct
  misc_feature 1..21: note = Description of Artificial Sequence: Synthetic oligonucleotide
  source 1..21: mol_type = other DNA
  modified_base 1: mod_base = OTHER; note = 2'-O-Methyl nucleotide
  modified_base 2: mod_base = OTHER; note = 2'-O-Methyl nucleotide
  modified_base 3: mod_base = OTHER; note = 2'-fluoro nucleotide
  modified_base 4: mod_base = OTHER; note = 2'-O-Methyl nucleotide
  modified_base 5: mod_base = OTHER; note = 2'-fluoro nucleotide
  modified_base 6: mod_base = OTHER; note = 2'-O-Methyl nucleotide
  modified_base 7: mod_base = OTHER; note = 2'-fluoro nucleotide
  modified_base 8: mod_base = OTHER; note = 2'-O-Methyl nucleotide
  modified_base 9: mod_base = OTHER; note = 2'-fluoro nucleotide
  modified_base 10: mod_base = OTHER; note = 2'-O-Methyl nucleotide
  modified_base 11: mod_base = OTHER; note = 2'-fluoro nucleotide
  modified_base 12: mod_base = OTHER; note = 2'-O-Methyl nucleotide
  modified_base 13: mod_base = OTHER; note = 2'-fluoro nucleotide
  modified_base 14: mod_base = OTHER; note = 2'-O-Methyl nucleotide
  modified_base 15: mod_base = OTHER; note = 2'-fluoro nucleotide
  modified_base 16: mod_base = OTHER; note = 2'-O-Methyl nucleotide
  modified_base 17: mod_base = OTHER; note = 2'-fluoro nucleotide
  modified_base 18: mod_base = OTHER; note = 2'-O-Methyl nucleotide
  modified_base 19: mod_base = OTHER; note = 2'-fluoro nucleotide
  modified_base 20: mod_base = OTHER; note = deoxy-thymine phosphorothioate
  misc_feature 1..19: note = RNA
  misc_feature 20..21: note = DNA
gcccgagtccccgcctcgctt

SEQ ID NO: 1261 - DNA, 21 bp, synthetic construct
  misc_feature 1..21: note = Description of Artificial Sequence: Synthetic oligonucleotide
  source 1..21: mol_type = other DNA
  modified_base 1: mod_base = OTHER; note = 2'-fluoro nucleotide
  modified_base 2: mod_base = OTHER; note = 2'-fluoro nucleotide
  modified_base 3: mod_base = OTHER; note = 2'-O-Methyl nucleotide
  modified_base 4: mod_base = OTHER; note = 2'-fluoro nucleotide
  modified_base 5: mod_base = OTHER; note = 2'-O-Methyl nucleotide
  modified_base 6: mod_base = OTHER; note = 2'-fluoro nucleotide
  modified_base 7: mod_base = OTHER; note = 2'-O-Methyl nucleotide
  modified_base 8: mod_base = OTHER; note = 2'-fluoro nucleotide
  modified_base 9: mod_base = OTHER; note = 2'-O-Methyl nucleotide
  modified_base 10: mod_base = OTHER; note = 2'-fluoro nucleotide
  modified_base 11: mod_base = OTHER; note = 2'-O-Methyl nucleotide
  modified_base 12: mod_base = OTHER; note = 2'-fluoro nucleotide
  modified_base 13: mod_base = OTHER; note = 2'-O-Methyl nucleotide
  modified_base 14: mod_base = OTHER; note = 2'-fluoro nucleotide
  modified_base 15: mod_base = OTHER; note = 2'-O-Methyl nucleotide
  modified_base 16: mod_base = OTHER; note = 2'-fluoro nucleotide
  modified_base 17: mod_base = OTHER; note = 2'-O-Methyl nucleotide
  modified_base 18: mod_base = OTHER; note = 2'-fluoro nucleotide
  modified_base 19: mod_base = OTHER; note = 2'-O-Methyl nucleotide
  modified_base 20: mod_base = OTHER; note = deoxy-thymine phosphorothioate
  misc_feature 1..19: note = RNA
  misc_feature 20..21: note = DNA
gcgaggcggggactcgggctt

SEQ ID NO: 1262 - DNA, 21 bp, synthetic construct
  misc_feature 1..21: note = Description of Artificial Sequence: Synthetic oligonucleotide
  source 1..21: mol_type = other DNA
  modified_base 1: mod_base = OTHER; note = 2'-O-Methyl nucleotide
  modified_base 2: mod_base = OTHER; note = 2'-O-Methyl nucleotide
  modified_base 3: mod_base = OTHER; note = 2'-fluoro nucleotide
  modified_base 4: mod_base = OTHER; note = 2'-O-Methyl nucleotide
  modified_base 5: mod_base = OTHER; note = 2'-fluoro nucleotide
  modified_base 6: mod_base = OTHER; note = 2'-O-Methyl nucleotide
  modified_base 7: mod_base = OTHER; note = 2'-fluoro nucleotide
  modified_base 8: mod_base = OTHER; note = 2'-O-Methyl nucleotide
  modified_base 9: mod_base = OTHER; note = 2'-fluoro nucleotide
  modified_base 10: mod_base = OTHER; note = 2'-O-Methyl nucleotide
  modified_base 11: mod_base = OTHER; note = 2'-fluoro nucleotide
  modified_base 12: mod_base = OTHER; note = 2'-O-Methyl nucleotide
  modified_base 13: mod_base = OTHER; note = 2'-fluoro nucleotide
  modified_base 14: mod_base = OTHER; note = 2'-O-Methyl nucleotide
  modified_base 15: mod_base = OTHER; note = 2'-fluoro nucleotide
  modified_base 16: mod_base = OTHER; note = 2'-O-Methyl nucleotide
  modified_base 17: mod_base = OTHER; note = 2'-fluoro nucleotide
  modified_base 18: mod_base = OTHER; note = 2'-O-Methyl nucleotide
  modified_base 19: mod_base = OTHER; note = 2'-fluoro nucleotide
  modified_base 20: mod_base = OTHER; note = deoxy-thymine phosphorothioate
  misc_feature 1..19: note = RNA
  misc_feature 20..21: note = DNA
aacgccacaaccaccgcgctt

SEQ ID NO: 1263 - DNA, 21 bp, synthetic construct
  misc_feature 1..21: note = Description of Artificial Sequence: Synthetic oligonucleotide
  source 1..21: mol_type = other DNA
  modified_base 1: mod_base = OTHER; note = 2'-fluoro nucleotide
  modified_base 2: mod_base = OTHER; note = 2'-fluoro nucleotide
  modified_base 3: mod_base = OTHER; note = 2'-O-Methyl nucleotide
  modified_base 4: mod_base = OTHER; note = 2'-fluoro nucleotide
  modified_base 5: mod_base = OTHER; note = 2'-O-Methyl nucleotide
  modified_base 6: mod_base = OTHER; note = 2'-fluoro nucleotide
  modified_base 7: mod_base = OTHER; note = 2'-O-Methyl nucleotide
  modified_base 8: mod_base = OTHER; note = 2'-fluoro nucleotide
  modified_base 9: mod_base = OTHER; note = 2'-O-Methyl nucleotide
  modified_base 10: mod_base = OTHER; note = 2'-fluoro nucleotide
  modified_base 11: mod_base = OTHER; note = 2'-O-Methyl nucleotide
  modified_base 12: mod_base = OTHER; note = 2'-fluoro nucleotide
  modified_base 13: mod_base = OTHER; note = 2'-O-Methyl nucleotide
  modified_base 14: mod_base = OTHER; note = 2'-fluoro nucleotide
  modified_base 15: mod_base = OTHER; note = 2'-O-Methyl nucleotide
  modified_base 16: mod_base = OTHER; note = 2'-fluoro nucleotide
  modified_base 17: mod_base = OTHER; note = 2'-O-Methyl nucleotide
  modified_base 18: mod_base = OTHER; note = 2'-fluoro nucleotide
  modified_base 19: mod_base = OTHER; note = 2'-O-Methyl nucleotide
  modified_base 20: mod_base = OTHER; note = deoxy-thymine phosphorothioate
  misc_feature 1..19: note = RNA
  misc_feature 20..21: note = DNA
gcgcggtggttgtggcgtttt

SEQ ID NO: 1264 - DNA, 21 bp, synthetic construct
  misc_feature 1..21: note = Description of Artificial Sequence: Synthetic oligonucleotide
  source 1..21: mol_type = other DNA
  modified_base 1: mod_base = OTHER; note = 2'-O-Methyl nucleotide
  modified_base 2: mod_base = OTHER; note = 2'-O-Methyl nucleotide
  modified_base 3: mod_base = OTHER; note = 2'-fluoro nucleotide
  modified_base 4: mod_base = OTHER; note = 2'-O-Methyl nucleotide
  modified_base 5: mod_base = OTHER; note = 2'-fluoro nucleotide
  modified_base 6: mod_base = OTHER; note = 2'-O-Methyl nucleotide
  modified_base 7: mod_base = OTHER; note = 2'-fluoro nucleotide
  modified_base 8: mod_base = OTHER; note = 2'-O-Methyl nucleotide
  modified_base 9: mod_base = OTHER; note = 2'-fluoro nucleotide
  modified_base 10: mod_base = OTHER; note = 2'-O-Methyl nucleotide
  modified_base 11: mod_base = OTHER; note = 2'-fluoro nucleotide
  modified_base 12: mod_base = OTHER; note = 2'-O-Methyl nucleotide
  modified_base 13: mod_base = OTHER; note = 2'-fluoro nucleotide
  modified_base 14: mod_base = OTHER; note = 2'-O-Methyl nucleotide
  modified_base 15: mod_base = OTHER; note = 2'-fluoro nucleotide
  modified_base 16: mod_base = OTHER; note = 2'-O-Methyl nucleotide
  modified_base 17: mod_base = OTHER; note = 2'-fluoro nucleotide
  modified_base 18: mod_base = OTHER; note = 2'-O-Methyl nucleotide
  modified_base 19: mod_base = OTHER; note = 2'-fluoro nucleotide
  modified_base 20: mod_base = OTHER; note = deoxy-thymine phosphorothioate
  misc_feature 1..19: note = RNA
  misc_feature 20..21: note = DNA
acgccacaaccaccgcgcatt

SEQ ID NO: 1265 - DNA, 21 bp, synthetic construct
  misc_feature 1..21: note = Description of Artificial Sequence: Synthetic oligonucleotide
  source 1..21: mol_type = other DNA
  modified_base 1: mod_base = OTHER; note = 2'-fluoro nucleotide
  modified_base 2: mod_base = OTHER; note = 2'-fluoro nucleotide
  modified_base 3: mod_base = OTHER; note = 2'-O-Methyl nucleotide
  modified_base 4: mod_base = OTHER; note = 2'-fluoro nucleotide
  modified_base 5: mod_base = OTHER; note = 2'-O-Methyl nucleotide
  modified_base 6: mod_base = OTHER; note = 2'-fluoro nucleotide
  modified_base 7: mod_base = OTHER; note = 2'-O-Methyl nucleotide
  modified_base 8: mod_base = OTHER; note = 2'-fluoro nucleotide
  modified_base 9: mod_base = OTHER; note = 2'-O-Methyl nucleotide
  modified_base 10: mod_base = OTHER; note = 2'-fluoro nucleotide
  modified_base 11: mod_base = OTHER; note = 2'-O-Methyl nucleotide
  modified_base 12: mod_base = OTHER; note = 2'-fluoro nucleotide
  modified_base 13: mod_base = OTHER; note = 2'-O-Methyl nucleotide
  modified_base 14: mod_base = OTHER; note = 2'-fluoro nucleotide
  modified_base 15: mod_base = OTHER; note = 2'-O-Methyl nucleotide
  modified_base 16: mod_base = OTHER; note = 2'-fluoro nucleotide
  modified_base 17: mod_base = OTHER; note = 2'-O-Methyl nucleotide
  modified_base 18: mod_base = OTHER; note = 2'-fluoro nucleotide
  modified_base 19: mod_base = OTHER; note = 2'-O-Methyl nucleotide
  modified_base 20: mod_base = OTHER; note = deoxy-thymine phosphorothioate
  misc_feature 1..19: note = RNA
  misc_feature 20..21: note = DNA
tgcgcggtggttgtggcgttt

SEQ ID NO: 1266 - DNA, 21 bp, synthetic construct
  misc_feature 1..21: note = Description of Artificial Sequence: Synthetic oligonucleotide
  source 1..21: mol_type = other DNA
  modified_base 1: mod_base = OTHER; note = 2'-O-Methyl nucleotide
  modified_base 2: mod_base = OTHER; note = 2'-O-Methyl nucleotide
  modified_base 3: mod_base = OTHER; note = 2'-fluoro nucleotide
  modified_base 4: mod_base = OTHER; note = 2'-O-Methyl nucleotide
  modified_base 5: mod_base = OTHER; note = 2'-fluoro nucleotide
  modified_base 6: mod_base = OTHER; note = 2'-O-Methyl nucleotide
  modified_base 7: mod_base = OTHER; note = 2'-fluoro nucleotide
  modified_base 8: mod_base = OTHER; note = 2'-O-Methyl nucleotide
  modified_base 9: mod_base = OTHER; note = 2'-fluoro nucleotide
  modified_base 10: mod_base = OTHER; note = 2'-O-Methyl nucleotide
  modified_base 11: mod_base = OTHER; note = 2'-fluoro nucleotide
  modified_base 12: mod_base = OTHER; note = 2'-O-Methyl nucleotide
  modified_base 13: mod_base = OTHER; note = 2'-fluoro nucleotide
  modified_base 14: mod_base = OTHER; note = 2'-O-Methyl nucleotide
  modified_base 15: mod_base = OTHER; note = 2'-fluoro nucleotide
  modified_base 16: mod_base = OTHER; note = 2'-O-Methyl nucleotide
  modified_base 17: mod_base = OTHER; note = 2'-fluoro nucleotide
  modified_base 18: mod_base = OTHER; note = 2'-O-Methyl nucleotide
  modified_base 19: mod_base = OTHER; note = 2'-fluoro nucleotide
  modified_base 20: mod_base = OTHER; note = deoxy-thymine phosphorothioate
  misc_feature 1..19: note = RNA
  misc_feature 20..21: note = DNA
cgccacaaccaccgcgcactt

SEQ ID NO: 1267 - DNA, 21 bp, synthetic construct
  misc_feature 1..21: note = Description of Artificial Sequence: Synthetic oligonucleotide
  source 1..21: mol_type = other DNA
  modified_base 1: mod_base = OTHER; note = 2'-fluoro nucleotide
  modified_base 2: mod_base = OTHER; note = 2'-fluoro nucleotide
  modified_base 3: mod_base = OTHER; note = 2'-O-Methyl nucleotide
  modified_base 4: mod_base = OTHER; note = 2'-fluoro nucleotide
  modified_base 5: mod_base = OTHER; note = 2'-O-Methyl nucleotide
  modified_base 6: mod_base = OTHER; note = 2'-fluoro nucleotide
  modified_base 7: mod_base = OTHER; note = 2'-O-Methyl nucleotide
  modified_base 8: mod_base = OTHER; note = 2'-fluoro nucleotide
  modified_base 9: mod_base = OTHER; note = 2'-O-Methyl nucleotide
  modified_base 10: mod_base = OTHER; note = 2'-fluoro nucleotide
  modified_base 11: mod_base = OTHER; note = 2'-O-Methyl nucleotide
  modified_base 12: mod_base = OTHER; note = 2'-fluoro nucleotide
  modified_base 13: mod_base = OTHER; note = 2'-O-Methyl nucleotide
  modified_base 14: mod_base = OTHER; note = 2'-fluoro nucleotide
  modified_base 15: mod_base = OTHER; note = 2'-O-Methyl nucleotide
  modified_base 16: mod_base = OTHER; note = 2'-fluoro nucleotide
  modified_base 17: mod_base = OTHER; note = 2'-O-Methyl nucleotide
  modified_base 18: mod_base = OTHER; note = 2'-fluoro nucleotide
  modified_base 19: mod_base = OTHER; note = 2'-O-Methyl nucleotide
  modified_base 20: mod_base = OTHER; note = deoxy-thymine phosphorothioate
  misc_feature 1..19: note = RNA
  misc_feature 20..21: note = DNA
gtgcgcggtggttgtggcgtt

SEQ ID NO: 1268 - DNA, 21 bp, synthetic construct
  misc_feature 1..21: note = Description of Artificial Sequence: Synthetic oligonucleotide
  source 1..21: mol_type = other DNA
  modified_base 1: mod_base = OTHER; note = 2'-O-Methyl nucleotide
  modified_base 2: mod_base = OTHER; note = 2'-O-Methyl nucleotide
  modified_base 3: mod_base = OTHER; note = 2'-fluoro nucleotide
  modified_base 4: mod_base = OTHER; note = 2'-O-Methyl nucleotide
  modified_base 5: mod_base = OTHER; note = 2'-fluoro nucleotide
  modified_base 6: mod_base = OTHER; note = 2'-O-Methyl nucleotide
  modified_base 7: mod_base = OTHER; note = 2'-fluoro nucleotide
  modified_base 8: mod_base = OTHER; note = 2'-O-Methyl nucleotide
  modified_base 9: mod_base = OTHER; note = 2'-fluoro nucleotide
  modified_base 10: mod_base = OTHER; note = 2'-O-Methyl nucleotide
  modified_base 11: mod_base = OTHER; note = 2'-fluoro nucleotide
  modified_base 12: mod_base = OTHER; note = 2'-O-Methyl nucleotide
  modified_base 13: mod_base = OTHER; note = 2'-fluoro nucleotide
  modified_base 14: mod_base = OTHER; note = 2'-O-Methyl nucleotide
  modified_base 15: mod_base = OTHER; note = 2'-fluoro nucleotide
  modified_base 16: mod_base = OTHER; note = 2'-O-Methyl nucleotide
  modified_base 17: mod_base = OTHER; note = 2'-fluoro nucleotide
  modified_base 18: mod_base = OTHER; note = 2'-O-Methyl nucleotide
  modified_base 19: mod_base = OTHER; note = 2'-fluoro nucleotide
  modified_base 20: mod_base = OTHER; note = deoxy-thymine phosphorothioate
  misc_feature 1..19: note = RNA
  misc_feature 20..21: note = DNA
ccacaaccaccgcgcacggtt

SEQ ID NO: 1269 - DNA, 21 bp, synthetic construct
  misc_feature 1..21: note = Description of Artificial Sequence: Synthetic oligonucleotide
  source 1..21: mol_type = other DNA
  modified_base 1: mod_base = OTHER; note = 2'-fluoro nucleotide
  modified_base 2: mod_base = OTHER; note = 2'-fluoro nucleotide
  modified_base 3: mod_base = OTHER; note = 2'-O-Methyl nucleotide
  modified_base 4: mod_base = OTHER; note = 2'-fluoro nucleotide
  modified_base 5: mod_base = OTHER; note = 2'-O-Methyl nucleotide
  modified_base 6: mod_base = OTHER; note = 2'-fluoro nucleotide
  modified_base 7: mod_base = OTHER; note = 2'-O-Methyl nucleotide
  modified_base 8: mod_base = OTHER; note = 2'-fluoro nucleotide
  modified_base 9: mod_base = OTHER; note = 2'-O-Methyl nucleotide
  modified_base 10: mod_base = OTHER; note = 2'-fluoro nucleotide
  modified_base 11: mod_base = OTHER; note = 2'-O-Methyl nucleotide
  modified_base 12: mod_base = OTHER; note = 2'-fluoro nucleotide
  modified_base 13: mod_base = OTHER; note = 2'-O-Methyl nucleotide
  modified_base 14: mod_base = OTHER; note = 2'-fluoro nucleotide
  modified_base 15: mod_base = OTHER; note = 2'-O-Methyl nucleotide
  modified_base 16: mod_base = OTHER; note = 2'-fluoro nucleotide
  modified_base 17: mod_base = OTHER; note = 2'-O-Methyl nucleotide
  modified_base 18: mod_base = OTHER; note = 2'-fluoro nucleotide
  modified_base 19: mod_base = OTHER; note = 2'-O-Methyl nucleotide
  modified_base 20: mod_base = OTHER; note = deoxy-thymine phosphorothioate
  misc_feature 1..19: note = RNA
  misc_feature 20..21: note = DNA
ccgtgcgcggtggttgtggtt

SEQ ID NO: 1270 - DNA, 21 bp, synthetic construct
  misc_feature 1..21: note = Description of Artificial Sequence: Synthetic oligonucleotide
  source 1..21: mol_type = other DNA
  modified_base 1: mod_base = OTHER; note = 2'-O-Methyl nucleotide
  modified_base 2: mod_base = OTHER; note = 2'-O-Methyl nucleotide
  modified_base 3: mod_base = OTHER; note = 2'-fluoro nucleotide
  modified_base 4: mod_base = OTHER; note = 2'-O-Methyl nucleotide
  modified_base 5: mod_base = OTHER; note = 2'-fluoro nucleotide
  modified_base 6: mod_base = OTHER; note = 2'-O-Methyl nucleotide
  modified_base 7: mod_base = OTHER; note = 2'-fluoro nucleotide
  modified_base 8: mod_base = OTHER; note = 2'-O-Methyl nucleotide
  modified_base 9: mod_base = OTHER; note = 2'-fluoro nucleotide
  modified_base 10: mod_base = OTHER; note = 2'-O-Methyl nucleotide
  modified_base 11: mod_base = OTHER; note = 2'-fluoro nucleotide
  modified_base 12: mod_base = OTHER; note = 2'-O-Methyl nucleotide
  modified_base 13: mod_base = OTHER; note = 2'-fluoro nucleotide
  modified_base 14: mod_base = OTHER; note = 2'-O-Methyl nucleotide
  modified_base 15: mod_base = OTHER; note = 2'-fluoro nucleotide
  modified_base 16: mod_base = OTHER; note = 2'-O-Methyl nucleotide
  modified_base 17: mod_base = OTHER; note = 2'-fluoro nucleotide
  modified_base 18: mod_base = OTHER; note = 2'-O-Methyl nucleotide
  modified_base 19: mod_base = OTHER; note = 2'-fluoro nucleotide
  modified_base 20: mod_base = OTHER; note = deoxy-thymine phosphorothioate
  misc_feature 1..19: note = RNA
  misc_feature 20..21: note = DNA
cacaaccaccgcgcacggctt

SEQ ID NO: 1271 - DNA, 21 bp, synthetic construct
  misc_feature 1..21: note = Description of Artificial Sequence: Synthetic oligonucleotide
  source 1..21: mol_type = other DNA
  modified_base 1: mod_base = OTHER; note = 2'-fluoro nucleotide
  modified_base 2: mod_base = OTHER; note = 2'-fluoro nucleotide
  modified_base 3: mod_base = OTHER; note = 2'-O-Methyl nucleotide
  modified_base 4: mod_base = OTHER; note = 2'-fluoro nucleotide
  modified_base 5: mod_base = OTHER; note = 2'-O-Methyl nucleotide
  modified_base 6: mod_base = OTHER; note = 2'-fluoro nucleotide
  modified_base 7: mod_base = OTHER; note = 2'-O-Methyl nucleotide
  modified_base 8: mod_base = OTHER; note = 2'-fluoro nucleotide
  modified_base 9: mod_base = OTHER; note = 2'-O-Methyl nucleotide
  modified_base 10: mod_base = OTHER; note = 2'-fluoro nucleotide
  modified_base 11: mod_base = OTHER; note = 2'-O-Methyl nucleotide
  modified_base 12: mod_base = OTHER; note = 2'-fluoro nucleotide
  modified_base 13: mod_base = OTHER; note = 2'-O-Methyl nucleotide
  modified_base 14: mod_base = OTHER; note = 2'-fluoro nucleotide
  modified_base 15: mod_base = OTHER; note = 2'-O-Methyl nucleotide
  modified_base 16: mod_base = OTHER; note = 2'-fluoro nucleotide
  modified_base 17: mod_base = OTHER; note = 2'-O-Methyl nucleotide
  modified_base 18: mod_base = OTHER; note = 2'-fluoro nucleotide
  modified_base 19: mod_base = OTHER; note = 2'-O-Methyl nucleotide
  modified_base 20: mod_base = OTHER; note = deoxy-thymine phosphorothioate
  misc_feature 1..19: note = RNA
  misc_feature 20..21: note = DNA
gccgtgcgcggtggttgtgtt

SEQ ID NO: 1272 - DNA, 21 bp, synthetic construct
  misc_feature 1..21: note = Description of Artificial Sequence: Synthetic oligonucleotide
  source 1..21: mol_type = other DNA
  modified_base 1: mod_base = OTHER; note = 2'-O-Methyl nucleotide
  modified_base 2: mod_base = OTHER; note = 2'-O-Methyl nucleotide
  modified_base 3: mod_base = OTHER; note = 2'-fluoro nucleotide
  modified_base 4: mod_base = OTHER; note = 2'-O-Methyl nucleotide
  modified_base 5: mod_base = OTHER; note = 2'-fluoro nucleotide
  modified_base 6: mod_base = OTHER; note = 2'-O-Methyl nucleotide
  modified_base 7: mod_base = OTHER; note = 2'-fluoro nucleotide
  modified_base 8: mod_base = OTHER; note = 2'-O-Methyl nucleotide
  modified_base 9: mod_base = OTHER; note = 2'-fluoro nucleotide
  modified_base 10: mod_base = OTHER; note = 2'-O-Methyl nucleotide
  modified_base 11: mod_base = OTHER; note = 2'-fluoro nucleotide
  modified_base 12: mod_base = OTHER; note = 2'-O-Methyl nucleotide
  modified_base 13: mod_base = OTHER; note = 2'-fluoro nucleotide
  modified_base 14: mod_base = OTHER; note = 2'-O-Methyl nucleotide
  modified_base 15: mod_base = OTHER; note = 2'-fluoro nucleotide
  modified_base 16: mod_base = OTHER; note = 2'-O-Methyl nucleotide
  modified_base 17: mod_base = OTHER; note = 2'-fluoro nucleotide
  modified_base 18: mod_base = OTHER; note = 2'-O-Methyl nucleotide
  modified_base 19: mod_base = OTHER; note = 2'-fluoro nucleotide
  modified_base 20: mod_base = OTHER; note = deoxy-thymine phosphorothioate
  misc_feature 1..19: note = RNA
  misc_feature 20..21: note = DNA
acaaccaccgcgcacggcctt

SEQ ID NO: 1273 - DNA, 21 bp, synthetic construct
  misc_feature 1..21: note = Description of Artificial Sequence: Synthetic oligonucleotide
  source 1..21: mol_type = other DNA
  modified_base 1: mod_base = OTHER; note = 2'-fluoro nucleotide
  modified_base 2: mod_base = OTHER; note = 2'-fluoro nucleotide
  modified_base 3: mod_base = OTHER; note = 2'-O-Methyl nucleotide
  modified_base 4: mod_base = OTHER; note = 2'-fluoro nucleotide
  modified_base 5: mod_base = OTHER; note = 2'-O-Methyl nucleotide
  modified_base 6: mod_base = OTHER; note = 2'-fluoro nucleotide
  modified_base 7: mod_base = OTHER; note = 2'-O-Methyl nucleotide
  modified_base 8: mod_base = OTHER; note = 2'-fluoro nucleotide
  modified_base 9: mod_base = OTHER; note = 2'-O-Methyl nucleotide
  modified_base 10: mod_base = OTHER; note = 2'-fluoro nucleotide
  modified_base 11: mod_base = OTHER; note = 2'-O-Methyl nucleotide
  modified_base 12: mod_base = OTHER; note = 2'-fluoro nucleotide
  modified_base 13: mod_base = OTHER; note = 2'-O-Methyl nucleotide
  modified_base 14: mod_base = OTHER; note = 2'-fluoro nucleotide
  modified_base 15: mod_base = OTHER; note = 2'-O-Methyl nucleotide
  modified_base 16: mod_base = OTHER; note = 2'-fluoro nucleotide
  modified_base 17: mod_base = OTHER; note = 2'-O-Methyl nucleotide
  modified_base 18: mod_base = OTHER; note = 2'-fluoro nucleotide
  modified_base 19: mod_base = OTHER; note = 2'-O-Methyl nucleotide
  modified_base 20: mod_base = OTHER; note = deoxy-thymine phosphorothioate
  misc_feature 1..19: note = RNA
  misc_feature 20..21: note = DNA
ggccgtgcgcggtggttgttt

SEQ ID NO: 1274 - DNA, 21 bp, synthetic construct
  misc_feature 1..21: note = Description of Artificial Sequence: Synthetic oligonucleotide
  source 1..21: mol_type = other DNA
  modified_base 1: mod_base = OTHER; note = 2'-O-Methyl nucleotide
  modified_base 2: mod_base = OTHER; note = 2'-O-Methyl nucleotide
  modified_base 3: mod_base = OTHER; note = 2'-fluoro nucleotide
  modified_base 4: mod_base = OTHER; note = 2'-O-Methyl nucleotide
  modified_base 5: mod_base = OTHER; note = 2'-fluoro nucleotide
  modified_base 6: mod_base = OTHER; note = 2'-O-Methyl nucleotide
  modified_base 7: mod_base = OTHER; note = 2'-fluoro nucleotide
  modified_base 8: mod_base = OTHER; note = 2'-O-Methyl nucleotide
  modified_base 9: mod_base = OTHER; note = 2'-fluoro nucleotide
  modified_base 10: mod_base = OTHER; note = 2'-O-Methyl nucleotide
  modified_base 11: mod_base = OTHER; note = 2'-fluoro nucleotide
  modified_base 12: mod_base = OTHER; note = 2'-O-Methyl nucleotide
  modified_base 13: mod_base = OTHER; note = 2'-fluoro nucleotide
  modified_base 14: mod_base = OTHER; note = 2'-O-Methyl nucleotide
  modified_base 15: mod_base = OTHER; note = 2'-fluoro nucleotide
  modified_base 16: mod_base = OTHER; note = 2'-O-Methyl nucleotide
  modified_base 17: mod_base = OTHER; note = 2'-fluoro nucleotide
  modified_base 18: mod_base = OTHER; note = 2'-O-Methyl nucleotide
  modified_base 19: mod_base = OTHER; note = 2'-fluoro nucleotide
  modified_base 20: mod_base = OTHER; note = deoxy-thymine phosphorothioate
  misc_feature 1..19: note = RNA
  misc_feature 20..21: note = DNA
atgcgaccctccgggacggtt

SEQ ID NO: 1275 - DNA, 21 bp, synthetic construct
  misc_feature 1..21: note = Description of Artificial Sequence: Synthetic oligonucleotide
  source 1..21: mol_type = other DNA
  modified_base 1: mod_base = OTHER; note = 2'-fluoro nucleotide
  modified_base 2: mod_base = OTHER; note = 2'-fluoro nucleotide
  modified_base 3: mod_base = OTHER; note = 2'-O-Methyl nucleotide
  modified_base 4: mod_base = OTHER; note = 2'-fluoro nucleotide
  modified_base 5: mod_base = OTHER; note = 2'-O-Methyl nucleotide
  modified_base 6: mod_base = OTHER; note = 2'-fluoro nucleotide
  modified_base 7: mod_base = OTHER; note = 2'-O-Methyl nucleotide
  modified_base 8: mod_base = OTHER; note = 2'-fluoro nucleotide
  modified_base 9: mod_base = OTHER; note = 2'-O-Methyl nucleotide
  modified_base 10: mod_base = OTHER; note = 2'-fluoro nucleotide
  modified_base 11: mod_base = OTHER; note = 2'-O-Methyl nucleotide
  modified_base 12: mod_base = OTHER; note = 2'-fluoro nucleotide
  modified_base 13: mod_base = OTHER; note = 2'-O-Methyl nucleotide
  modified_base 14: mod_base = OTHER; note = 2'-fluoro nucleotide
  modified_base 15: mod_base = OTHER; note = 2'-O-Methyl nucleotide
  modified_base 16: mod_base = OTHER; note = 2'-fluoro nucleotide
  modified_base 17: mod_base = OTHER; note = 2'-O-Methyl nucleotide
  modified_base 18: mod_base = OTHER; note = 2'-fluoro nucleotide
  modified_base 19: mod_base = OTHER; note = 2'-O-Methyl nucleotide
  modified_base 20: mod_base = OTHER; note = deoxy-thymine phosphorothioate
  misc_feature 1..19: note = RNA
  misc_feature 20..21: note = DNA
ccgtcccggagggtcgcattt

SEQ ID NO: 1276 - DNA, 21 bp, synthetic construct
  misc_feature 1..21: note = Description of Artificial Sequence: Synthetic oligonucleotide
  source 1..21: mol_type = other DNA
  modified_base 1: mod_base = OTHER; note = 2'-O-Methyl nucleotide
  modified_base 2: mod_base = OTHER; note = 2'-O-Methyl nucleotide
  modified_base 3: mod_base = OTHER; note = 2'-fluoro nucleotide
  modified_base 4: mod_base = OTHER; note = 2'-O-Methyl nucleotide
  modified_base 5: mod_base = OTHER; note = 2'-fluoro nucleotide
  modified_base 6: mod_base = OTHER; note = 2'-O-Methyl nucleotide
  modified_base 7: mod_base = OTHER; note = 2'-fluoro nucleotide
  modified_base 8: mod_base = OTHER; note = 2'-O-Methyl nucleotide
  modified_base 9: mod_base = OTHER; note = 2'-fluoro nucleotide
  modified_base 10: mod_base = OTHER; note = 2'-O-Methyl nucleotide
  modified_base 11: mod_base = OTHER; note = 2'-fluoro nucleotide
  modified_base 12: mod_base = OTHER; note = 2'-O-Methyl nucleotide
  modified_base 13: mod_base = OTHER; note = 2'-fluoro nucleotide
  modified_base 14: mod_base = OTHER; note = 2'-O-Methyl nucleotide
  modified_base 15: mod_base = OTHER; note = 2'-fluoro nucleotide
  modified_base 16: mod_base = OTHER; note = 2'-O-Methyl nucleotide
  modified_base 17: mod_base = OTHER; note = 2'-fluoro nucleotide
  modified_base 18: mod_base = OTHER; note = 2'-O-Methyl nucleotide
  modified_base 19: mod_base = OTHER; note = 2'-fluoro nucleotide
  modified_base 20: mod_base = OTHER; note = deoxy-thymine phosphorothioate
  misc_feature 1..19: note = RNA
  misc_feature 20..21: note = DNA
tgcgaccctccgggacggctt

SEQ ID NO: 1277 - DNA, 21 bp, synthetic construct
  misc_feature 1..21: note = Description of Artificial Sequence: Synthetic oligonucleotide
  source 1..21: mol_type = other DNA
  modified_base 1: mod_base = OTHER; note = 2'-fluoro nucleotide
  modified_base 2: mod_base = OTHER; note = 2'-fluoro nucleotide
  modified_base 3: mod_base = OTHER; note = 2'-O-Methyl nucleotide
  modified_base 4: mod_base = OTHER; note = 2'-fluoro nucleotide
  modified_base 5: mod_base = OTHER; note = 2'-O-Methyl nucleotide
  modified_base 6: mod_base = OTHER; note = 2'-fluoro nucleotide
  modified_base 7: mod_base = OTHER; note = 2'-O-Methyl nucleotide
  modified_base 8: mod_base = OTHER; note = 2'-fluoro nucleotide
  modified_base 9: mod_base = OTHER; note = 2'-O-Methyl nucleotide
  modified_base 10: mod_base = OTHER; note = 2'-fluoro nucleotide
  modified_base 11: mod_base = OTHER; note = 2'-O-Methyl nucleotide
  modified_base 12: mod_base = OTHER; note = 2'-fluoro nucleotide
  modified_base 13: mod_base = OTHER; note = 2'-O-Methyl nucleotide
  modified_base 14: mod_base = OTHER; note = 2'-fluoro nucleotide
  modified_base 15: mod_base = OTHER; note = 2'-O-Methyl nucleotide
  modified_base 16: mod_base = OTHER; note = 2'-fluoro nucleotide
  modified_base 17: mod_base = OTHER; note = 2'-O-Methyl nucleotide
  modified_base 18: mod_base = OTHER; note = 2'-fluoro nucleotide
  modified_base 19: mod_base = OTHER; note = 2'-O-Methyl nucleotide
  modified_base 20: mod_base = OTHER; note = deoxy-thymine phosphorothioate
  misc_feature 1..19: note = RNA
  misc_feature 20..21: note = DNA
gccgtcccggagggtcgcatt

SEQ ID NO: 1278 - DNA, 21 bp, synthetic construct
  misc_feature 1..21: note = Description of Artificial Sequence: Synthetic oligonucleotide
  source 1..21: mol_type = other DNA
  modified_base 1: mod_base = OTHER; note = 2'-O-Methyl nucleotide
  modified_base 2: mod_base = OTHER; note = 2'-O-Methyl nucleotide
  modified_base 3: mod_base = OTHER; note = 2'-fluoro nucleotide
  modified_base 4: mod_base = OTHER; note = 2'-O-Methyl nucleotide
  modified_base 5: mod_base = OTHER; note = 2'-fluoro nucleotide
  modified_base 6: mod_base = OTHER; note = 2'-O-Methyl nucleotide
  modified_base 7: mod_base = OTHER; note = 2'-fluoro nucleotide
  modified_base 8: mod_base = OTHER; note = 2'-O-Methyl nucleotide
  modified_base 9: mod_base = OTHER; note = 2'-fluoro nucleotide
  modified_base 10: mod_base = OTHER; note = 2'-O-Methyl nucleotide
  modified_base 11: mod_base = OTHER; note = 2'-fluoro nucleotide
  modified_base 12: mod_base = OTHER; note = 2'-O-Methyl nucleotide
  modified_base 13: mod_base = OTHER; note = 2'-fluoro nucleotide
  modified_base 14: mod_base = OTHER; note = 2'-O-Methyl nucleotide
  modified_base 15: mod_base = OTHER; note = 2'-fluoro nucleotide
  modified_base 16: mod_base = OTHER; note = 2'-O-Methyl nucleotide
  modified_base 17: mod_base = OTHER; note = 2'-fluoro nucleotide
  modified_base 18: mod_base = OTHER; note = 2'-O-Methyl nucleotide
  modified_base 19: mod_base = OTHER; note = 2'-fluoro nucleotide
  modified_base 20: mod_base = OTHER; note = deoxy-thymine phosphorothioate
  misc_feature 1..19: note = RNA
  misc_feature 20..21: note = DNA
gcgaccctccgggacggcctt

SEQ ID NO: 1279 - DNA, 21 bp, synthetic construct
  misc_feature 1..21: note = Description of Artificial Sequence: Synthetic oligonucleotide
  source 1..21: mol_type = other DNA
  modified_base 1: mod_base = OTHER; note = 2'-fluoro nucleotide
  modified_base 2: mod_base = OTHER; note = 2'-fluoro nucleotide
  modified_base 3: mod_base = OTHER; note = 2'-O-Methyl nucleotide
  modified_base 4: mod_base = OTHER; note = 2'-fluoro nucleotide
  modified_base 5: mod_base = OTHER; note = 2'-O-Methyl nucleotide
  modified_base 6: mod_base = OTHER; note = 2'-fluoro nucleotide
  modified_base 7: mod_base = OTHER; note = 2'-O-Methyl nucleotide
  modified_base 8: mod_base = OTHER; note = 2'-fluoro nucleotide
  modified_base 9: mod_base = OTHER; note = 2'-O-Methyl nucleotide
  modified_base 10: mod_base = OTHER; note = 2'-fluoro nucleotide
  modified_base 11: mod_base = OTHER; note = 2'-O-Methyl nucleotide
  modified_base 12: mod_base = OTHER; note = 2'-fluoro nucleotide
  modified_base 13: mod_base = OTHER; note = 2'-O-Methyl nucleotide
  modified_base 14: mod_base = OTHER; note = 2'-fluoro nucleotide
  modified_base 15: mod_base = OTHER; note = 2'-O-Methyl nucleotide
  modified_base 16: mod_base = OTHER; note = 2'-fluoro nucleotide
  modified_base 17: mod_base = OTHER; note = 2'-O-Methyl nucleotide
  modified_base 18: mod_base = OTHER; note = 2'-fluoro nucleotide
  modified_base 19: mod_base = OTHER; note = 2'-O-Methyl nucleotide
  modified_base 20: mod_base = OTHER; note = deoxy-thymine phosphorothioate
  misc_feature 1..19: note = RNA
  misc_feature 20..21: note = DNA
ggccgtcccggagggtcgctt

SEQ ID NO: 1280 - DNA, 21 bp, synthetic construct
  misc_feature 1..21: note = Description of Artificial Sequence: Synthetic oligonucleotide
  source 1..21: mol_type = other DNA
  modified_base 1: mod_base = OTHER; note = 2'-O-Methyl nucleotide
  modified_base 2: mod_base = OTHER; note = 2'-O-Methyl nucleotide
  modified_base 3: mod_base = OTHER; note = 2'-fluoro nucleotide
  modified_base 4: mod_base = OTHER; note = 2'-O-Methyl nucleotide
  modified_base 5: mod_base = OTHER; note = 2'-fluoro nucleotide
  modified_base 6: mod_base = OTHER; note = 2'-O-Methyl nucleotide
  modified_base 7: mod_base = OTHER; note = 2'-fluoro nucleotide
  modified_base 8: mod_base = OTHER; note = 2'-O-Methyl nucleotide
  modified_base 9: mod_base = OTHER; note = 2'-fluoro nucleotide
  modified_base 10: mod_base = OTHER; note = 2'-O-Methyl nucleotide
  modified_base 11: mod_base = OTHER; note = 2'-fluoro nucleotide
  modified_base 12: mod_base = OTHER; note = 2'-O-Methyl nucleotide
  modified_base 13: mod_base = OTHER; note = 2'-fluoro nucleotide
  modified_base 14: mod_base = OTHER; note = 2'-O-Methyl nucleotide
  modified_base 15: mod_base = OTHER; note = 2'-fluoro nucleotide
  modified_base 16: mod_base = OTHER; note = 2'-O-Methyl nucleotide
  modified_base 17: mod_base = OTHER; note = 2'-fluoro nucleotide
  modified_base 18: mod_base = OTHER; note = 2'-O-Methyl nucleotide
  modified_base 19: mod_base = OTHER; note = 2'-fluoro nucleotide
  modified_base 20: mod_base = OTHER; note = deoxy-thymine phosphorothioate
  misc_feature 1..19: note = RNA
  misc_feature 20..21: note = DNA
gaccctccgggacggccggtt

SEQ ID NO: 1281 - DNA, 21 bp, synthetic construct
  misc_feature 1..21: note = Description of Artificial Sequence: Synthetic oligonucleotide
  source 1..21: mol_type = other DNA
  modified_base 1: mod_base = OTHER; note = 2'-fluoro nucleotide
  modified_base 2: mod_base = OTHER; note = 2'-fluoro nucleotide
  modified_base 3: mod_base = OTHER; note = 2'-O-Methyl nucleotide
  modified_base 4: mod_base = OTHER; note = 2'-fluoro nucleotide
  modified_base 5: mod_base = OTHER; note = 2'-O-Methyl nucleotide
  modified_base 6: mod_base = OTHER; note = 2'-fluoro nucleotide
  modified_base 7: mod_base = OTHER; note = 2'-O-Methyl nucleotide
  modified_base 8: mod_base = OTHER; note = 2'-fluoro nucleotide
  modified_base 9: mod_base = OTHER; note = 2'-O-Methyl nucleotide
  modified_base 10: mod_base = OTHER; note = 2'-fluoro nucleotide
  modified_base 11: mod_base = OTHER; note = 2'-O-Methyl nucleotide
  modified_base 12: mod_base = OTHER; note = 2'-fluoro nucleotide
  modified_base 13: mod_base = OTHER; note = 2'-O-Methyl nucleotide
  modified_base 14: mod_base = OTHER; note = 2'-fluoro nucleotide
  modified_base 15: mod_base = OTHER; note = 2'-O-Methyl nucleotide
  modified_base 16: mod_base = OTHER; note = 2'-fluoro nucleotide
  modified_base 17: mod_base = OTHER; note = 2'-O-Methyl nucleotide
  modified_base 18: mod_base = OTHER; note = 2'-fluoro nucleotide
  modified_base 19: mod_base = OTHER; note = 2'-O-Methyl nucleotide
  modified_base 20: mod_base = OTHER; note = deoxy-thymine phosphorothioate
  misc_feature 1..19: note = RNA
  misc_feature 20..21: note = DNA
ccggccgtcccggagggtctt

SEQ ID NO: 1282 - DNA, 21 bp, synthetic construct
  misc_feature 1..21: note = Description of Artificial Sequence: Synthetic oligonucleotide
  source 1..21: mol_type = other DNA
  modified_base 1: mod_base = OTHER; note = 2'-O-Methyl nucleotide
  modified_base 2: mod_base = OTHER; note = 2'-O-Methyl nucleotide
  modified_base 3: mod_base = OTHER; note = 2'-fluoro nucleotide
  modified_base 4: mod_base = OTHER; note = 2'-O-Methyl nucleotide
  modified_base 5: mod_base = OTHER; note = 2'-fluoro nucleotide
  modified_base 6: mod_base = OTHER; note = 2'-O-Methyl nucleotide
  modified_base 7: mod_base = OTHER; note = 2'-fluoro nucleotide
  modified_base 8: mod_base = OTHER; note = 2'-O-Methyl nucleotide
  modified_base 9: mod_base = OTHER; note = 2'-fluoro nucleotide
  modified_base 10: mod_base = OTHER; note = 2'-O-Methyl nucleotide
  modified_base 11: mod_base = OTHER; note = 2'-fluoro nucleotide
  modified_base 12: mod_base = OTHER; note = 2'-O-Methyl nucleotide
  modified_base 13: mod_base = OTHER; note = 2'-fluoro nucleotide
  modified_base 14: mod_base = OTHER; note = 2'-O-Methyl nucleotide
  modified_base 15: mod_base = OTHER; note = 2'-fluoro nucleotide
  modified_base 16: mod_base = OTHER; note = 2'-O-Methyl nucleotide
  modified_base 17: mod_base = OTHER; note = 2'-fluoro nucleotide
  modified_base 18: mod_base = OTHER; note = 2'-O-Methyl nucleotide
  modified_base 19: mod_base = OTHER; note = 2'-fluoro nucleotide
  modified_base 20: mod_base = OTHER; note = deoxy-thymine phosphorothioate
  misc_feature 1..19: note = RNA
  misc_feature 20..21: note = DNA
accctccgggacggccgggtt

SEQ ID NO: 1283 - DNA, 21 bp, synthetic construct
  misc_feature 1..21: note = Description of Artificial Sequence: Synthetic oligonucleotide
  source 1..21: mol_type = other DNA
  modified_base 1: mod_base = OTHER; note = 2'-fluoro nucleotide
  modified_base 2: mod_base = OTHER; note = 2'-fluoro nucleotide
  modified_base 3: mod_base = OTHER; note = 2'-O-Methyl nucleotide
  modified_base 4: mod_base = OTHER; note = 2'-fluoro nucleotide
  modified_base 5: mod_base = OTHER; note = 2'-O-Methyl nucleotide
  modified_base 6: mod_base = OTHER; note = 2'-fluoro nucleotide
  modified_base 7: mod_base = OTHER; note = 2'-O-Methyl nucleotide
  modified_base 8: mod_base = OTHER; note = 2'-fluoro nucleotide
  modified_base 9: mod_base = OTHER; note = 2'-O-Methyl nucleotide
  modified_base 10: mod_base = OTHER; note = 2'-fluoro nucleotide
  modified_base 11: mod_base = OTHER; note = 2'-O-Methyl nucleotide
  modified_base 12: mod_base = OTHER; note = 2'-fluoro nucleotide
  modified_base 13: mod_base = OTHER; note = 2'-O-Methyl nucleotide
  modified_base 14: mod_base = OTHER; note = 2'-fluoro nucleotide
  modified_base 15: mod_base = OTHER; note = 2'-O-Methyl nucleotide
  modified_base 16: mod_base = OTHER; note = 2'-fluoro nucleotide
  modified_base 17: mod_base = OTHER; note = 2'-O-Methyl nucleotide
  modified_base 18: mod_base = OTHER; note = 2'-fluoro nucleotide
  modified_base 19: mod_base = OTHER; note = 2'-O-Methyl nucleotide
  modified_base 20: mod_base = OTHER; note = deoxy-thymine phosphorothioate
  misc_feature 1..19: note = RNA
  misc_feature 20..21: note = DNA
cccggccgtcccggagggttt

SEQ ID NO: 1284 - DNA, 21 bp, synthetic construct
  misc_feature 1..21: note = Description of Artificial Sequence: Synthetic oligonucleotide
  source 1..21: mol_type = other DNA
  modified_base 1: mod_base = OTHER; note = 2'-O-Methyl nucleotide
  modified_base 2: mod_base = OTHER; note = 2'-O-Methyl nucleotide
  modified_base 3: mod_base = OTHER; note = 2'-fluoro nucleotide
  modified_base 4: mod_base = OTHER; note = 2'-O-Methyl nucleotide
  modified_base 5: mod_base = OTHER; note = 2'-fluoro nucleotide
  modified_base 6: mod_base = OTHER; note = 2'-O-Methyl nucleotide
  modified_base 7: mod_base = OTHER; note = 2'-fluoro nucleotide
  modified_base 8: mod_base = OTHER; note = 2'-O-Methyl nucleotide
  modified_base 9: mod_base = OTHER; note = 2'-fluoro nucleotide
  modified_base 10: mod_base = OTHER; note = 2'-O-Methyl nucleotide
  modified_base 11: mod_base = OTHER; note = 2'-fluoro nucleotide
  modified_base 12: mod_base = OTHER; note = 2'-O-Methyl nucleotide
  modified_base 13: mod_base = OTHER; note = 2'-fluoro nucleotide
  modified_base 14: mod_base = OTHER; note = 2'-O-Methyl nucleotide
  modified_base 15: mod_base = OTHER; note = 2'-fluoro nucleotide
  modified_base 16: mod_base = OTHER; note = 2'-O-Methyl nucleotide
  modified_base 17: mod_base = OTHER; note = 2'-fluoro nucleotide
  modified_base 18: mod_base = OTHER; note = 2'-O-Methyl nucleotide
  modified_base 19: mod_base = OTHER; note = 2'-fluoro nucleotide
  modified_base 20: mod_base = OTHER; note = deoxy-thymine phosphorothioate
  misc_feature 1..19: note = RNA
  misc_feature 20..21: note = DNA
cctccgggacggccggggctt

SEQ ID NO: 1285 - DNA, 21 bp, synthetic construct
  misc_feature 1..21: note = Description of Artificial Sequence: Synthetic oligonucleotide
  source 1..21: mol_type = other DNA
  modified_base 1: mod_base = OTHER; note = 2'-fluoro nucleotide
  modified_base 2: mod_base = OTHER; note = 2'-fluoro nucleotide
  modified_base 3: mod_base = OTHER; note = 2'-O-Methyl nucleotide
  modified_base 4: mod_base = OTHER; note = 2'-fluoro nucleotide
  modified_base 5: mod_base = OTHER; note = 2'-O-Methyl nucleotide
  modified_base 6: mod_base = OTHER; note = 2'-fluoro nucleotide
  modified_base 7: mod_base = OTHER; note = 2'-O-Methyl nucleotide
  modified_base 8: mod_base = OTHER; note = 2'-fluoro nucleotide
  modified_base 9: mod_base = OTHER; note = 2'-O-Methyl nucleotide
  modified_base 10: mod_base = OTHER; note = 2'-fluoro nucleotide
  modified_base 11: mod_base = OTHER; note = 2'-O-Methyl nucleotide
  modified_base 12: mod_base = OTHER; note = 2'-fluoro nucleotide
  modified_base 13: mod_base = OTHER; note = 2'-O-Methyl nucleotide
  modified_base 14: mod_base = OTHER; note = 2'-fluoro nucleotide
  modified_base 15: mod_base = OTHER; note = 2'-O-Methyl nucleotide
  modified_base 16: mod_base = OTHER; note = 2'-fluoro nucleotide
  modified_base 17: mod_base = OTHER; note = 2'-O-Methyl nucleotide
  modified_base 18: mod_base = OTHER; note = 2'-fluoro nucleotide
  modified_base 19: mod_base = OTHER; note = 2'-O-Methyl nucleotide
  modified_base 20: mod_base = OTHER; note = deoxy-thymine phosphorothioate
  misc_feature 1..19: note = RNA
  misc_feature 20..21: note = DNA
gccccggccgtcccggaggtt

SEQ ID NO: 1286 - DNA, 21 bp, synthetic construct
  misc_feature 1..21: note = Description of Artificial Sequence: Synthetic oligonucleotide
  source 1..21: mol_type = other DNA
  modified_base 1: mod_base = OTHER; note = 2'-O-Methyl nucleotide
  modified_base 2: mod_base = OTHER; note = 2'-O-Methyl nucleotide
  modified_base 3: mod_base = OTHER; note = 2'-fluoro nucleotide
  modified_base 4: mod_base = OTHER; note = 2'-O-Methyl nucleotide
  modified_base 5: mod_base = OTHER; note = 2'-fluoro nucleotide
  modified_base 6: mod_base = OTHER; note = 2'-O-Methyl nucleotide
  modified_base 7: mod_base = OTHER; note = 2'-fluoro nucleotide
  modified_base 8: mod_base = OTHER; note = 2'-O-Methyl nucleotide
  modified_base 9: mod_base = OTHER; note = 2'-fluoro nucleotide
  modified_base 10: mod_base = OTHER; note = 2'-O-Methyl nucleotide
  modified_base 11: mod_base = OTHER; note = 2'-fluoro nucleotide
  modified_base 12: mod_base = OTHER; note = 2'-O-Methyl nucleotide
  modified_base 13: mod_base = OTHER; note = 2'-fluoro nucleotide
  modified_base 14: mod_base = OTHER; note = 2'-O-Methyl nucleotide
  modified_base 15: mod_base = OTHER; note = 2'-fluoro nucleotide
  modified_base 16: mod_base = OTHER; note = 2'-O-Methyl nucleotide
  modified_base 17: mod_base = OTHER; note = 2'-fluoro nucleotide
  modified_base 18: mod_base = OTHER; note = 2'-O-Methyl nucleotide
  modified_base 19: mod_base = OTHER; note = 2'-fluoro nucleotide
  modified_base 20: mod_base = OTHER; note = deoxy-thymine phosphorothioate
  misc_feature 1..19: note = RNA
  misc_feature 20..21: note = DNA
agaaagtttgccaaggcactt

SEQ ID NO: 1287 - DNA, 21 bp, synthetic construct
  misc_feature 1..21: note = Description of Artificial Sequence: Synthetic oligonucleotide
  source 1..21: mol_type = other DNA
  modified_base 1: mod_base = OTHER; note = 2'-fluoro nucleotide
  modified_base 2: mod_base = OTHER; note = 2'-fluoro nucleotide
  modified_base 3: mod_base = OTHER; note = 2'-O-Methyl nucleotide
  modified_base 4: mod_base = OTHER; note = 2'-fluoro nucleotide
  modified_base 5: mod_base = OTHER; note = 2'-O-Methyl nucleotide
  modified_base 6: mod_base = OTHER; note = 2'-fluoro nucleotide
  modified_base 7: mod_base = OTHER; note = 2'-O-Methyl nucleotide
  modified_base 8: mod_base = OTHER; note = 2'-fluoro nucleotide
  modified_base 9: mod_base = OTHER; note = 2'-O-Methyl nucleotide
  modified_base 10: mod_base = OTHER; note = 2'-fluoro nucleotide
  modified_base 11: mod_base = OTHER; note = 2'-O-Methyl nucleotide
  modified_base 12: mod_base = OTHER; note = 2'-fluoro nucleotide
  modified_base 13: mod_base = OTHER; note = 2'-O-Methyl nucleotide
  modified_base 14: mod_base = OTHER; note = 2'-fluoro nucleotide
  modified_base 15: mod_base = OTHER; note = 2'-O-Methyl nucleotide
  modified_base 16: mod_base = OTHER; note = 2'-fluoro nucleotide
  modified_base 17: mod_base = OTHER; note = 2'-O-Methyl nucleotide
  modified_base 18: mod_base = OTHER; note = 2'-fluoro nucleotide
  modified_base 19: mod_base = OTHER; note = 2'-O-Methyl nucleotide
  modified_base 20: mod_base = OTHER; note = deoxy-thymine phosphorothioate
  misc_feature 1..19: note = RNA
  misc_feature 20..21: note = DNA
gtgccttggcaaactttcttt

SEQ ID NO: 1288 - DNA, 21 bp, synthetic construct
  misc_feature 1..21: note = Description of Artificial Sequence: Synthetic oligonucleotide
  source 1..21: mol_type = other DNA
  modified_base 1: mod_base = OTHER; note = 2'-O-Methyl nucleotide
  modified_base 2: mod_base = OTHER; note = 2'-O-Methyl nucleotide
  modified_base 3: mod_base = OTHER; note = 2'-fluoro nucleotide
  modified_base 4: mod_base = OTHER; note = 2'-O-Methyl nucleotide
  modified_base 5: mod_base = OTHER; note = 2'-fluoro nucleotide
  modified_base 6: mod_base = OTHER; note = 2'-O-Methyl nucleotide
  modified_base 7: mod_base = OTHER; note = 2'-fluoro nucleotide
  modified_base 8: mod_base = OTHER; note = 2'-O-Methyl nucleotide
  modified_base 9: mod_base = OTHER; note = 2'-fluoro nucleotide
  modified_base 10: mod_base = OTHER; note = 2'-O-Methyl nucleotide
  modified_base 11: mod_base = OTHER; note = 2'-fluoro nucleotide
  modified_base 12: mod_base = OTHER; note = 2'-O-Methyl nucleotide
  modified_base 13: mod_base = OTHER; note = 2'-fluoro nucleotide
  modified_base 14: mod_base = OTHER; note = 2'-O-Methyl nucleotide
  modified_base 15: mod_base = OTHER; note = 2'-fluoro nucleotide
  modified_base 16: mod_base = OTHER; note = 2'-O-Methyl nucleotide
  modified_base 17: mod_base = OTHER; note = 2'-fluoro nucleotide
  modified_base 18: mod_base = OTHER; note = 2'-O-Methyl nucleotide
  modified_base 19: mod_base = OTHER; note = 2'-fluoro nucleotide
  modified_base 20: mod_base = OTHER; note = deoxy-thymine phosphorothioate
  misc_feature 1..19: note = RNA
  misc_feature 20..21: note = DNA
gaaagtttgccaaggcacgtt

SEQ ID NO: 1289 - DNA, 21 bp, synthetic construct
  misc_feature 1..21: note = Description of Artificial Sequence: Synthetic oligonucleotide
  source 1..21: mol_type = other DNA
  modified_base 1: mod_base = OTHER; note = 2'-fluoro nucleotide
  modified_base 2: mod_base = OTHER; note = 2'-fluoro nucleotide
  modified_base 3: mod_base = OTHER; note = 2'-O-Methyl nucleotide
  modified_base 4: mod_base = OTHER; note = 2'-fluoro nucleotide
  modified_base 5: mod_base = OTHER; note = 2'-O-Methyl nucleotide
  modified_base 6: mod_base = OTHER; note = 2'-fluoro nucleotide
  modified_base 7: mod_base = OTHER; note = 2'-O-Methyl nucleotide
  modified_base 8: mod_base = OTHER; note = 2'-fluoro nucleotide
  modified_base 9: mod_base = OTHER; note = 2'-O-Methyl nucleotide
  modified_base 10: mod_base = OTHER; note = 2'-fluoro nucleotide
  modified_base 11: mod_base = OTHER; note = 2'-O-Methyl nucleotide
  modified_base 12: mod_base = OTHER; note = 2'-fluoro nucleotide
  modified_base 13: mod_base = OTHER; note = 2'-O-Methyl nucleotide
  modified_base 14: mod_base = OTHER; note = 2'-fluoro nucleotide
  modified_base 15: mod_base = OTHER; note = 2'-O-Methyl nucleotide
  modified_base 16: mod_base = OTHER; note = 2'-fluoro nucleotide
  modified_base 17: mod_base = OTHER; note = 2'-O-Methyl nucleotide
  modified_base 18: mod_base = OTHER; note = 2'-fluoro nucleotide
  modified_base 19: mod_base = OTHER; note = 2'-O-Methyl nucleotide
  modified_base 20: mod_base = OTHER; note = deoxy-thymine phosphorothioate
  misc_feature 1..19: note = RNA
  misc_feature 20..21: note = DNA
cgtgccttggcaaactttctt

SEQ ID NO: 1290 - DNA, 21 bp, synthetic construct
  misc_feature 1..21: note = Description of Artificial Sequence: Synthetic oligonucleotide
  source 1..21: mol_type = other DNA
  modified_base 1: mod_base = OTHER; note = 2'-O-Methyl nucleotide
  modified_base 2: mod_base = OTHER; note = 2'-O-Methyl nucleotide
  modified_base 3: mod_base = OTHER; note = 2'-fluoro nucleotide
  modified_base 4: mod_base = OTHER; note = 2'-O-Methyl nucleotide
  modified_base 5: mod_base = OTHER; note = 2'-fluoro nucleotide
  modified_base 6: mod_base = OTHER; note = 2'-O-Methyl nucleotide
  modified_base 7: mod_base = OTHER; note = 2'-fluoro nucleotide
  modified_base 8: mod_base = OTHER; note = 2'-O-Methyl nucleotide
  modified_base 9: mod_base = OTHER; note = 2'-fluoro nucleotide
  modified_base 10: mod_base = OTHER; note = 2'-O-Methyl nucleotide
  modified_base 11: mod_base = OTHER; note = 2'-fluoro nucleotide
  modified_base 12: mod_base = OTHER; note = 2'-O-Methyl nucleotide
  modified_base 13: mod_base = OTHER; note = 2'-fluoro nucleotide
  modified_base 14: mod_base = OTHER; note = 2'-O-Methyl nucleotide
  modified_base 15: mod_base = OTHER; note = 2'-fluoro nucleotide
  modified_base 16: mod_base = OTHER; note = 2'-O-Methyl nucleotide
  modified_base 17: mod_base = OTHER; note = 2'-fluoro nucleotide
  modified_base 18: mod_base = OTHER; note = 2'-O-Methyl nucleotide
  modified_base 19: mod_base = OTHER; note = 2'-fluoro nucleotide
  modified_base 20: mod_base = OTHER; note = deoxy-thymine phosphorothioate
  misc_feature 1..19: note = RNA
  misc_feature 20..21: note = DNA
aagtttgccaaggcacgagtt

SEQ ID NO: 1291 - DNA, 21 bp, synthetic construct
  misc_feature 1..21: note = Description of Artificial Sequence: Synthetic oligonucleotide
  source 1..21: mol_type = other DNA
  modified_base 1: mod_base = OTHER; note = 2'-fluoro nucleotide
  modified_base 2: mod_base = OTHER; note = 2'-fluoro nucleotide
  modified_base 3: mod_base = OTHER; note = 2'-O-Methyl nucleotide
  modified_base 4: mod_base = OTHER; note = 2'-fluoro nucleotide
  modified_base 5: mod_base = OTHER; note = 2'-O-Methyl nucleotide
  modified_base 6: mod_base = OTHER; note = 2'-fluoro nucleotide
  modified_base 7: mod_base = OTHER; note = 2'-O-Methyl nucleotide
  modified_base 8: mod_base = OTHER; note = 2'-fluoro nucleotide
  modified_base 9: mod_base = OTHER; note = 2'-O-Methyl nucleotide
  modified_base 10: mod_base = OTHER; note = 2'-fluoro nucleotide
  modified_base 11: mod_base = OTHER; note = 2'-O-Methyl nucleotide
  modified_base 12: mod_base = OTHER; note = 2'-fluoro nucleotide
  modified_base 13: mod_base = OTHER; note = 2'-O-Methyl nucleotide
  modified_base 14: mod_base = OTHER; note = 2'-fluoro nucleotide
  modified_base 15: mod_base = OTHER; note = 2'-O-Methyl nucleotide
  modified_base 16: mod_base = OTHER; note = 2'-fluoro nucleotide
  modified_base 17: mod_base = OTHER; note = 2'-O-Methyl nucleotide
  modified_base 18: mod_base = OTHER; note = 2'-fluoro nucleotide
  modified_base 19: mod_base = OTHER; note = 2'-O-Methyl nucleotide
  modified_base 20: mod_base = OTHER; note = deoxy-thymine phosphorothioate
  misc_feature 1..19: note = RNA
  misc_feature 20..21: note = DNA
ctcgtgccttggcaaactttt

SEQ ID NO: 1292 - DNA, 21 bp, synthetic construct
  misc_feature 1..21: note = Description of Artificial Sequence: Synthetic oligonucleotide
  source 1..21: mol_type = other DNA
  modified_base 1: mod_base = OTHER; note = 2'-O-Methyl nucleotide
  modified_base 2: mod_base = OTHER; note = 2'-O-Methyl nucleotide
  modified_base 3: mod_base = OTHER; note = 2'-fluoro nucleotide
  modified_base 4: mod_base = OTHER; note = 2'-O-Methyl nucleotide
  modified_base 5: mod_base = OTHER; note = 2'-fluoro nucleotide
  modified_base 6: mod_base = OTHER; note = 2'-O-Methyl nucleotide
  modified_base 7: mod_base = OTHER; note = 2'-fluoro nucleotide
  modified_base 8: mod_base = OTHER; note = 2'-O-Methyl nucleotide
  modified_base 9: mod_base = OTHER; note = 2'-fluoro nucleotide
  modified_base 10: mod_base = OTHER; note = 2'-O-Methyl nucleotide
  modified_base 11: mod_base = OTHER; note = 2'-fluoro nucleotide
  modified_base 12: mod_base = OTHER; note = 2'-O-Methyl nucleotide
  modified_base 13: mod_base = OTHER; note = 2'-fluoro nucleotide
  modified_base 14: mod_base = OTHER; note = 2'-O-Methyl nucleotide
  modified_base 15: mod_base = OTHER; note = 2'-fluoro nucleotide
  modified_base 16: mod_base = OTHER; note = 2'-O-Methyl nucleotide
  modified_base 17: mod_base = OTHER; note = 2'-fluoro nucleotide
  modified_base 18: mod_base = OTHER; note = 2'-O-Methyl nucleotide
  modified_base 19: mod_base = OTHER; note = 2'-fluoro nucleotide
  modified_base 20: mod_base = OTHER; note = deoxy-thymine phosphorothioate
  misc_feature 1..19: note = RNA
  misc_feature 20..21: note = DNA
agtttgccaaggcacgagttt

SEQ ID NO: 1293 - DNA, 21 bp, synthetic construct
  misc_feature 1..21: note = Description of Artificial Sequence: Synthetic oligonucleotide
  source 1..21: mol_type = other DNA
  modified_base 1: mod_base = OTHER; note = 2'-fluoro nucleotide
  modified_base 2: mod_base = OTHER; note = 2'-fluoro nucleotide
  modified_base 3: mod_base = OTHER; note = 2'-O-Methyl nucleotide
  modified_base 4: mod_base = OTHER; note = 2'-fluoro nucleotide
  modified_base 5: mod_base = OTHER; note = 2'-O-Methyl nucleotide
  modified_base 6: mod_base = OTHER; note = 2'-fluoro nucleotide
  modified_base 7: mod_base = OTHER; note = 2'-O-Methyl nucleotide
  modified_base 8: mod_base = OTHER; note = 2'-fluoro nucleotide
  modified_base 9: mod_base = OTHER; note = 2'-O-Methyl nucleotide
  modified_base 10: mod_base = OTHER; note = 2'-fluoro nucleotide
  modified_base 11: mod_base = OTHER; note = 2'-O-Methyl nucleotide
  modified_base 12: mod_base = OTHER; note = 2'-fluoro nucleotide
  modified_base 13: mod_base = OTHER; note = 2'-O-Methyl nucleotide
  modified_base 14: mod_base = OTHER; note = 2'-fluoro nucleotide
  modified_base 15: mod_base = OTHER; note = 2'-O-Methyl nucleotide
  modified_base 16: mod_base = OTHER; note = 2'-fluoro nucleotide
  modified_base 17: mod_base = OTHER; note = 2'-O-Methyl nucleotide
  modified_base 18: mod_base = OTHER; note = 2'-fluoro nucleotide
  modified_base 19: mod_base = OTHER; note = 2'-O-Methyl nucleotide
  modified_base 20: mod_base = OTHER; note = deoxy-thymine phosphorothioate
  misc_feature 1..19: note = RNA
  misc_feature 20..21: note = DNA
actcgtgccttggcaaacttt

SEQ ID NO: 1294 - DNA, 21 bp, synthetic construct
  misc_feature 1..21: note = Description of Artificial Sequence: Synthetic oligonucleotide
  source 1..21: mol_type = other DNA
  modified_base 1: mod_base = OTHER; note = 2'-O-Methyl nucleotide
  modified_base 2: mod_base = OTHER; note = 2'-O-Methyl nucleotide
  modified_base 3: mod_base = OTHER; note = 2'-fluoro nucleotide
  modified_base 4: mod_base = OTHER; note = 2'-O-Methyl nucleotide
  modified_base 5: mod_base = OTHER; note = 2'-fluoro nucleotide
  modified_base 6: mod_base = OTHER; note = 2'-O-Methyl nucleotide
  modified_base 7: mod_base = OTHER; note = 2'-fluoro nucleotide
  modified_base 8: mod_base = OTHER; note = 2'-O-Methyl nucleotide
  modified_base 9: mod_base = OTHER; note = 2'-fluoro nucleotide
  modified_base 10: mod_base = OTHER; note = 2'-O-Methyl nucleotide
  modified_base 11: mod_base = OTHER; note = 2'-fluoro nucleotide
  modified_base 12: mod_base = OTHER; note = 2'-O-Methyl nucleotide
  modified_base 13: mod_base = OTHER; note = 2'-fluoro nucleotide
  modified_base 14: mod_base = OTHER; note = 2'-O-Methyl nucleotide
  modified_base 15: mod_base = OTHER; note = 2'-fluoro nucleotide
  modified_base 16: mod_base = OTHER; note = 2'-O-Methyl nucleotide
  modified_base 17: mod_base = OTHER; note = 2'-fluoro nucleotide
  modified_base 18: mod_base = OTHER; note = 2'-O-Methyl nucleotide
  modified_base 19: mod_base = OTHER; note = 2'-fluoro nucleotide
  modified_base 20: mod_base = OTHER; note = deoxy-thymine phosphorothioate
  misc_feature 1..19: note = RNA
  misc_feature 20..21: note = DNA
gtttgccaaggcacgagtatt

SEQ ID NO: 1295 - DNA, 21 bp, synthetic construct
  misc_feature 1..21: note = Description of Artificial Sequence: Synthetic oligonucleotide
  source 1..21: mol_type = other DNA
  modified_base 1: mod_base = OTHER; note = 2'-fluoro nucleotide
  modified_base 2: mod_base = OTHER; note = 2'-fluoro nucleotide
  modified_base 3: mod_base = OTHER; note = 2'-O-Methyl nucleotide
  modified_base 4: mod_base = OTHER; note = 2'-fluoro nucleotide
  modified_base 5: mod_base = OTHER; note = 2'-O-Methyl nucleotide
  modified_base 6: mod_base = OTHER; note = 2'-fluoro nucleotide
  modified_base 7: mod_base = OTHER; note = 2'-O-Methyl nucleotide
  modified_base 8: mod_base = OTHER; note = 2'-fluoro nucleotide
  modified_base 9: mod_base = OTHER; note = 2'-O-Methyl nucleotide
  modified_base 10: mod_base = OTHER; note = 2'-fluoro nucleotide
  modified_base 11: mod_base = OTHER; note = 2'-O-Methyl nucleotide
  modified_base 12: mod_base = OTHER; note = 2'-fluoro nucleotide
  modified_base 13: mod_base = OTHER; note = 2'-O-Methyl nucleotide
  modified_base 14: mod_base = OTHER; note = 2'-fluoro nucleotide
  modified_base 15: mod_base = OTHER; note = 2'-O-Methyl nucleotide
  modified_base 16: mod_base = OTHER; note = 2'-fluoro nucleotide
  modified_base 17: mod_base = OTHER; note = 2'-O-Methyl nucleotide
  modified_base 18: mod_base = OTHER; note = 2'-fluoro nucleotide
  modified_base 19: mod_base = OTHER; note = 2'-O-Methyl nucleotide
  modified_base 20: mod_base = OTHER; note = deoxy-thymine phosphorothioate
  misc_feature 1..19: note = RNA
  misc_feature 20..21: note = DNA
tactcgtgccttggcaaactt

SEQ ID NO: 1296 - DNA, 21 bp, synthetic construct
  misc_feature 1..21: note = Description of Artificial Sequence: Synthetic oligonucleotide
  source 1..21: mol_type = other DNA
  modified_base 1: mod_base = OTHER; note = 2'-O-Methyl nucleotide
  modified_base 2: mod_base = OTHER; note = 2'-O-Methyl nucleotide
  modified_base 3: mod_base = OTHER; note = 2'-fluoro nucleotide
  modified_base 4: mod_base = OTHER; note = 2'-O-Methyl nucleotide
  modified_base 5: mod_base = OTHER; note = 2'-fluoro nucleotide
  modified_base 6: mod_base = OTHER; note = 2'-O-Methyl nucleotide
  modified_base 7: mod_base = OTHER; note = 2'-fluoro nucleotide
  modified_base 8: mod_base = OTHER; note = 2'-O-Methyl nucleotide
  modified_base 9: mod_base = OTHER; note = 2'-fluoro nucleotide
  modified_base 10: mod_base = OTHER; note = 2'-O-Methyl nucleotide
  modified_base 11: mod_base = OTHER; note = 2'-fluoro nucleotide
  modified_base 12: mod_base = OTHER; note = 2'-O-Methyl nucleotide
  modified_base 13: mod_base = OTHER; note = 2'-fluoro nucleotide
  modified_base 14: mod_base = OTHER; note = 2'-O-Methyl nucleotide
  modified_base 15: mod_base = OTHER; note = 2'-fluoro nucleotide
  modified_base 16: mod_base = OTHER; note = 2'-O-Methyl nucleotide
  modified_base 17: mod_base = OTHER; note = 2'-fluoro nucleotide
  modified_base 18: mod_base = OTHER; note = 2'-O-Methyl nucleotide
  modified_base 19: mod_base = OTHER; note = 2'-fluoro nucleotide
  modified_base 20: mod_base = OTHER; note = deoxy-thymine phosphorothioate
  misc_feature 1..19: note = RNA
  misc_feature 20..21: note = DNA
tttgccaaggcacgagtaatt

SEQ ID NO: 1297 - DNA, 21 bp, synthetic construct
  misc_feature 1..21: note = Description of Artificial Sequence: Synthetic oligonucleotide
  source 1..21: mol_type = other DNA
  modified_base 1: mod_base = OTHER; note = 2'-fluoro nucleotide
  modified_base 2: mod_base = OTHER; note = 2'-fluoro nucleotide
  modified_base 3: mod_base = OTHER; note = 2'-O-Methyl nucleotide
  modified_base 4: mod_base = OTHER; note = 2'-fluoro nucleotide
  modified_base 5: mod_base = OTHER; note = 2'-O-Methyl nucleotide
  modified_base 6: mod_base = OTHER; note = 2'-fluoro nucleotide
  modified_base 7: mod_base = OTHER; note = 2'-O-Methyl nucleotide
  modified_base 8: mod_base = OTHER; note = 2'-fluoro nucleotide
  modified_base 9: mod_base = OTHER; note = 2'-O-Methyl nucleotide
  modified_base 10: mod_base = OTHER; note = 2'-fluoro nucleotide
  modified_base 11: mod_base = OTHER; note = 2'-O-Methyl nucleotide
  modified_base 12: mod_base = OTHER; note = 2'-fluoro nucleotide
  modified_base 13: mod_base = OTHER; note = 2'-O-Methyl nucleotide
  modified_base 14: mod_base = OTHER; note = 2'-fluoro nucleotide
  modified_base 15: mod_base = OTHER; note = 2'-O-Methyl nucleotide
  modified_base 16: mod_base = OTHER; note = 2'-fluoro nucleotide
  modified_base 17: mod_base = OTHER; note = 2'-O-Methyl nucleotide
  modified_base 18: mod_base = OTHER; note = 2'-fluoro nucleotide
  modified_base 19: mod_base = OTHER; note = 2'-O-Methyl nucleotide
  modified_base 20: mod_base = OTHER; note = deoxy-thymine phosphorothioate
  misc_feature 1..19: note = RNA
  misc_feature 20..21: note = DNA
ttactcgtgccttggcaaatt

SEQ ID NO: 1298 - DNA, 21 bp, synthetic construct
  misc_feature 1..21: note = Description of Artificial Sequence: Synthetic oligonucleotide
  source 1..21: mol_type = other DNA
  modified_base 1: mod_base = OTHER; note = 2'-O-Methyl nucleotide
  modified_base 2: mod_base = OTHER; note = 2'-O-Methyl nucleotide
  modified_base 3: mod_base = OTHER; note = 2'-fluoro nucleotide
  modified_base 4: mod_base = OTHER; note = 2'-O-Methyl nucleotide
  modified_base 5: mod_base = OTHER; note = 2'-fluoro nucleotide
  modified_base 6: mod_base = OTHER; note = 2'-O-Methyl nucleotide
  modified_base 7: mod_base = OTHER; note = 2'-fluoro nucleotide
  modified_base 8: mod_base = OTHER; note = 2'-O-Methyl nucleotide
  modified_base 9: mod_base = OTHER; note = 2'-fluoro nucleotide
  modified_base 10: mod_base = OTHER; note = 2'-O-Methyl nucleotide
  modified_base 11: mod_base = OTHER; note = 2'-fluoro nucleotide
  modified_base 12: mod_base = OTHER; note = 2'-O-Methyl nucleotide
  modified_base 13: mod_base = OTHER; note = 2'-fluoro nucleotide
  modified_base 14: mod_base = OTHER; note = 2'-O-Methyl nucleotide
  modified_base 15: mod_base = OTHER; note = 2'-fluoro nucleotide
  modified_base 16: mod_base = OTHER; note = 2'-O-Methyl nucleotide
  modified_base 17: mod_base = OTHER; note = 2'-fluoro nucleotide
  modified_base 18: mod_base = OTHER; note = 2'-O-Methyl nucleotide
  modified_base 19: mod_base = OTHER; note = 2'-fluoro nucleotide
  modified_base 20: mod_base = OTHER; note = deoxy-thymine phosphorothioate
  misc_feature 1..19: note = RNA
  misc_feature 20..21: note = DNA
ttgccaaggcacgagtaactt

SEQ ID NO: 1299 - DNA, 21 bp, synthetic construct
  misc_feature 1..21: note = Description of Artificial Sequence: Synthetic oligonucleotide
  source 1..21: mol_type = other DNA
  modified_base 1: mod_base = OTHER; note = 2'-fluoro nucleotide
  modified_base 2: mod_base = OTHER; note = 2'-fluoro nucleotide
  modified_base 3: mod_base = OTHER; note = 2'-O-Methyl nucleotide
  modified_base 4: mod_base = OTHER; note = 2'-fluoro nucleotide
  modified_base 5: mod_base = OTHER; note = 2'-O-Methyl nucleotide
  modified_base 6: mod_base = OTHER; note = 2'-fluoro nucleotide
  modified_base 7: mod_base = OTHER; note = 2'-O-Methyl nucleotide
  modified_base 8: mod_base = OTHER; note = 2'-fluoro nucleotide
  modified_base 9: mod_base = OTHER; note = 2'-O-Methyl nucleotide
  modified_base 10: mod_base = OTHER; note = 2'-fluoro nucleotide
  modified_base 11: mod_base = OTHER; note = 2'-O-Methyl nucleotide
  modified_base 12: mod_base = OTHER; note = 2'-fluoro nucleotide
  modified_base 13: mod_base = OTHER; note = 2'-O-Methyl nucleotide
  modified_base 14: mod_base = OTHER; note = 2'-fluoro nucleotide
  modified_base 15: mod_base = OTHER; note = 2'-O-Methyl nucleotide
  modified_base 16: mod_base = OTHER; note = 2'-fluoro nucleotide
  modified_base 17: mod_base = OTHER; note = 2'-O-Methyl nucleotide
  modified_base 18: mod_base = OTHER; note = 2'-fluoro nucleotide
  modified_base 19: mod_base = OTHER; note = 2'-O-Methyl nucleotide
  modified_base 20: mod_base = OTHER; note = deoxy-thymine phosphorothioate
  misc_feature 1..19: note = RNA
  misc_feature 20..21: note = DNA
gttactcgtgccttggcaatt

SEQ ID NO: 1300 - DNA, 21 bp, synthetic construct
  misc_feature 1..21: note = Description of Artificial Sequence: Synthetic oligonucleotide
  source 1..21: mol_type = other DNA
  modified_base 1: mod_base = OTHER; note = 2'-O-Methyl nucleotide
  modified_base 2: mod_base = OTHER; note = 2'-O-Methyl nucleotide
  modified_base 3: mod_base = OTHER; note = 2'-fluoro nucleotide
  modified_base 4: mod_base = OTHER; note = 2'-O-Methyl nucleotide
  modified_base 5: mod_base = OTHER; note = 2'-fluoro nucleotide
  modified_base 6: mod_base = OTHER; note = 2'-O-Methyl nucleotide
  modified_base 7: mod_base = OTHER; note = 2'-fluoro nucleotide
  modified_base 8: mod_base = OTHER; note = 2'-O-Methyl nucleotide
  modified_base 9: mod_base = OTHER; note = 2'-fluoro nucleotide
  modified_base 10: mod_base = OTHER; note = 2'-O-Methyl nucleotide
  modified_base 11: mod_base = OTHER; note = 2'-fluoro nucleotide
  modified_base 12: mod_base = OTHER; note = 2'-O-Methyl nucleotide
  modified_base 13: mod_base = OTHER; note = 2'-fluoro nucleotide
  modified_base 14: mod_base = OTHER; note = 2'-O-Methyl nucleotide
  modified_base 15: mod_base = OTHER; note = 2'-fluoro nucleotide
  modified_base 16: mod_base = OTHER; note = 2'-O-Methyl nucleotide
  modified_base 17: mod_base = OTHER; note = 2'-fluoro nucleotide
  modified_base 18: mod_base = OTHER; note = 2'-O-Methyl nucleotide
  modified_base 19: mod_base = OTHER; note = 2'-fluoro nucleotide
  modified_base 20: mod_base = OTHER; note = deoxy-thymine phosphorothioate
  misc_feature 1..19: note = RNA
  misc_feature 20..21: note = DNA
tgccaaggcacgagtaacatt

SEQ ID NO: 1301 - DNA, 21 bp, synthetic construct
  misc_feature 1..21: note = Description of Artificial Sequence: Synthetic oligonucleotide
  source 1..21: mol_type = other DNA
  modified_base 1: mod_base = OTHER; note = 2'-fluoro nucleotide
  modified_base 2: mod_base = OTHER; note = 2'-fluoro nucleotide
  modified_base 3: mod_base = OTHER; note = 2'-O-Methyl nucleotide
  modified_base 4: mod_base = OTHER; note = 2'-fluoro nucleotide
  modified_base 5: mod_base = OTHER; note = 2'-O-Methyl nucleotide
  modified_base 6: mod_base = OTHER; note = 2'-fluoro nucleotide
  modified_base 7: mod_base = OTHER; note = 2'-O-Methyl nucleotide
  modified_base 8: mod_base = OTHER; note = 2'-fluoro nucleotide
  modified_base 9: mod_base = OTHER; note = 2'-O-Methyl nucleotide
  modified_base 10: mod_base = OTHER; note = 2'-fluoro nucleotide
  modified_base 11: mod_base = OTHER; note = 2'-O-Methyl nucleotide
  modified_base 12: mod_base = OTHER; note = 2'-fluoro nucleotide
  modified_base 13: mod_base = OTHER; note = 2'-O-Methyl nucleotide
  modified_base 14: mod_base = OTHER; note = 2'-fluoro nucleotide
  modified_base 15: mod_base = OTHER; note = 2'-O-Methyl nucleotide
  modified_base 16: mod_base = OTHER; note = 2'-fluoro nucleotide
  modified_base 17: mod_base = OTHER; note = 2'-O-Methyl nucleotide
  modified_base 18: mod_base = OTHER; note = 2'-fluoro nucleotide
  modified_base 19: mod_base = OTHER; note = 2'-O-Methyl nucleotide
  modified_base 20: mod_base = OTHER; note = deoxy-thymine phosphorothioate
  misc_feature 1..19: note = RNA
  misc_feature 20..21: note = DNA
tgttactcgtgccttggcatt

SEQ ID NO: 1302 - DNA, 21 bp, synthetic construct
  misc_feature 1..21: note = Description of Artificial Sequence: Synthetic oligonucleotide
  source 1..21: mol_type = other DNA
  modified_base 1: mod_base = OTHER; note = 2'-O-Methyl nucleotide
  modified_base 2: mod_base = OTHER; note = 2'-O-Methyl nucleotide
  modified_base 3: mod_base = OTHER; note = 2'-fluoro nucleotide
  modified_base 4: mod_base = OTHER; note = 2'-O-Methyl nucleotide
  modified_base 5: mod_base = OTHER; note = 2'-fluoro nucleotide
  modified_base 6: mod_base = OTHER; note = 2'-O-Methyl nucleotide
  modified_base 7: mod_base = OTHER; note = 2'-fluoro nucleotide
  modified_base 8: mod_base = OTHER; note = 2'-O-Methyl nucleotide
  modified_base 9: mod_base = OTHER; note = 2'-fluoro nucleotide
  modified_base 10: mod_base = OTHER; note = 2'-O-Methyl nucleotide
  modified_base 11: mod_base = OTHER; note = 2'-fluoro nucleotide
  modified_base 12: mod_base = OTHER; note = 2'-O-Methyl nucleotide
  modified_base 13: mod_base = OTHER; note = 2'-fluoro nucleotide
  modified_base 14: mod_base = OTHER; note = 2'-O-Methyl nucleotide
  modified_base 15: mod_base = OTHER; note = 2'-fluoro nucleotide
  modified_base 16: mod_base = OTHER; note = 2'-O-Methyl nucleotide
  modified_base 17: mod_base = OTHER; note = 2'-fluoro nucleotide
  modified_base 18: mod_base = OTHER; note = 2'-O-Methyl nucleotide
  modified_base 19: mod_base = OTHER; note = 2'-fluoro nucleotide
  modified_base 20: mod_base = OTHER; note = deoxy-thymine phosphorothioate
  misc_feature 1..19: note = RNA
  misc_feature 20..21: note = DNA
gccaaggcacgagtaacaatt

SEQ ID NO: 1303 - DNA, 21 bp, synthetic construct
  misc_feature 1..21: note = Description of Artificial Sequence: Synthetic oligonucleotide
  source 1..21: mol_type = other DNA
  modified_base 1: mod_base = OTHER; note = 2'-fluoro nucleotide
  modified_base 2: mod_base = OTHER; note = 2'-fluoro nucleotide
  modified_base 3: mod_base = OTHER; note = 2'-O-Methyl nucleotide
  modified_base 4: mod_base = OTHER; note = 2'-fluoro nucleotide
  modified_base 5: mod_base = OTHER; note = 2'-O-Methyl nucleotide
  modified_base 6: mod_base = OTHER; note = 2'-fluoro nucleotide
  modified_base 7: mod_base = OTHER; note = 2'-O-Methyl nucleotide
  modified_base 8: mod_base = OTHER; note = 2'-fluoro nucleotide
  modified_base 9: mod_base = OTHER; note = 2'-O-Methyl nucleotide
  modified_base 10: mod_base = OTHER; note = 2'-fluoro nucleotide
  modified_base 11: mod_base = OTHER; note = 2'-O-Methyl nucleotide
  modified_base 12: mod_base = OTHER; note = 2'-fluoro nucleotide
  modified_base 13: mod_base = OTHER; note = 2'-O-Methyl nucleotide
  modified_base 14: mod_base = OTHER; note = 2'-fluoro nucleotide
  modified_base 15: mod_base = OTHER; note = 2'-O-Methyl nucleotide
  modified_base 16: mod_base = OTHER; note = 2'-fluoro nucleotide
  modified_base 17: mod_base = OTHER; note = 2'-O-Methyl nucleotide
  modified_base 18: mod_base = OTHER; note = 2'-fluoro nucleotide
  modified_base 19: mod_base = OTHER; note = 2'-O-Methyl nucleotide
  modified_base 20: mod_base = OTHER; note = deoxy-thymine phosphorothioate
  misc_feature 1..19: note = RNA
  misc_feature 20..21: note = DNA
ttgttactcgtgccttggctt

SEQ ID NO: 1304 - DNA, 21 bp, synthetic construct
  misc_feature 1..21: note = Description of Artificial Sequence: Synthetic oligonucleotide
  source 1..21: mol_type = other DNA
  modified_base 1: mod_base = OTHER; note = 2'-O-Methyl nucleotide
  modified_base 2: mod_base = OTHER; note = 2'-O-Methyl nucleotide
  modified_base 3: mod_base = OTHER; note = 2'-fluoro nucleotide
  modified_base 4: mod_base = OTHER; note = 2'-O-Methyl nucleotide
  modified_base 5: mod_base = OTHER; note = 2'-fluoro nucleotide
  modified_base 6: mod_base = OTHER; note = 2'-O-Methyl nucleotide
  modified_base 7: mod_base = OTHER; note = 2'-fluoro nucleotide
  modified_base 8: mod_base = OTHER; note = 2'-O-Methyl nucleotide
  modified_base 9: mod_base = OTHER; note = 2'-fluoro nucleotide
  modified_base 10: mod_base = OTHER; note = 2'-O-Methyl nucleotide
  modified_base 11: mod_base = OTHER; note = 2'-fluoro nucleotide
  modified_base 12: mod_base = OTHER; note = 2'-O-Methyl nucleotide
  modified_base 13: mod_base = OTHER; note = 2'-fluoro nucleotide
  modified_base 14: mod_base = OTHER; note = 2'-O-Methyl nucleotide
  modified_base 15: mod_base = OTHER; note = 2'-fluoro nucleotide
  modified_base 16: mod_base = OTHER; note = 2'-O-Methyl nucleotide
  modified_base 17: mod_base = OTHER; note = 2'-fluoro nucleotide
  modified_base 18: mod_base = OTHER; note = 2'-O-Methyl nucleotide
  modified_base 19: mod_base = OTHER; note = 2'-fluoro nucleotide
  modified_base 20: mod_base = OTHER; note = deoxy-thymine phosphorothioate
  misc_feature 1..19: note = RNA
  misc_feature 20..21: note = DNA
acgcagttgggcacttttgtt

SEQ ID NO: 1305 - DNA, 21 bp, synthetic construct
  misc_feature 1..21: note = Description of Artificial Sequence: Synthetic oligonucleotide
  source 1..21: mol_type = other DNA
  modified_base 1: mod_base = OTHER; note = 2'-fluoro nucleotide
  modified_base 2: mod_base = OTHER; note = 2'-fluoro nucleotide
  modified_base 3: mod_base = OTHER; note = 2'-O-Methyl nucleotide
  modified_base 4: mod_base = OTHER; note = 2'-fluoro nucleotide
  modified_base 5: mod_base = OTHER; note = 2'-O-Methyl nucleotide
  modified_base 6: mod_base = OTHER; note = 2'-fluoro nucleotide
  modified_base 7: mod_base = OTHER; note = 2'-O-Methyl nucleotide
  modified_base 8: mod_base = OTHER; note = 2'-fluoro nucleotide
  modified_base 9: mod_base = OTHER; note = 2'-O-Methyl nucleotide
  modified_base 10: mod_base = OTHER; note = 2'-fluoro nucleotide
  modified_base 11: mod_base = OTHER; note = 2'-O-Methyl nucleotide
  modified_base 12: mod_base = OTHER; note = 2'-fluoro nucleotide
  modified_base 13: mod_base = OTHER; note = 2'-O-Methyl nucleotide
  modified_base 14: mod_base = OTHER; note = 2'-fluoro nucleotide
  modified_base 15: mod_base = OTHER; note = 2'-O-Methyl nucleotide
  modified_base 16: mod_base = OTHER; note = 2'-fluoro nucleotide
  modified_base 17: mod_base = OTHER; note = 2'-O-Methyl nucleotide
  modified_base 18: mod_base = OTHER; note = 2'-fluoro nucleotide
  modified_base 19: mod_base = OTHER; note = 2'-O-Methyl nucleotide
  modified_base 20: mod_base = OTHER; note = deoxy-thymine phosphorothioate
  misc_feature 1..19: note = RNA
  misc_feature 20..21: note = DNA
caaaagtgcccaactgcgttt

SEQ ID NO: 1306 - DNA, 21 bp, synthetic construct
  misc_feature 1..21: note = Description of Artificial Sequence: Synthetic oligonucleotide
  source 1..21: mol_type = other DNA
  modified_base 1: mod_base = OTHER; note = 2'-O-Methyl nucleotide
  modified_base 2: mod_base = OTHER; note = 2'-O-Methyl nucleotide
  modified_base 3: mod_base = OTHER; note = 2'-fluoro nucleotide
  modified_base 4: mod_base = OTHER; note = 2'-O-Methyl nucleotide
  modified_base 5: mod_base = OTHER; note = 2'-fluoro nucleotide
  modified_base 6: mod_base = OTHER; note = 2'-O-Methyl nucleotide
  modified_base 7: mod_base = OTHER; note = 2'-fluoro nucleotide
  modified_base 8: mod_base = OTHER; note = 2'-O-Methyl nucleotide
  modified_base 9: mod_base = OTHER; note = 2'-fluoro nucleotide
  modified_base 10: mod_base = OTHER; note = 2'-O-Methyl nucleotide
  modified_base 11: mod_base = OTHER; note = 2'-fluoro nucleotide
  modified_base 12: mod_base = OTHER; note = 2'-O-Methyl nucleotide
  modified_base 13: mod_base = OTHER; note = 2'-fluoro nucleotide
  modified_base 14: mod_base = OTHER; note = 2'-O-Methyl nucleotide
  modified_base 15: mod_base = OTHER; note = 2'-fluoro nucleotide
  modified_base 16: mod_base = OTHER; note = 2'-O-Methyl nucleotide
  modified_base 17: mod_base = OTHER; note = 2'-fluoro nucleotide
  modified_base 18: mod_base = OTHER; note = 2'-O-Methyl nucleotide
  modified_base 19: mod_base = OTHER; note = 2'-fluoro nucleotide
  modified_base 20: mod_base = OTHER; note = deoxy-thymine phosphorothioate
  misc_feature 1..19: note = RNA
  misc_feature 20..21: note = DNA
cgcagttgggcacttttgatt

SEQ ID NO: 1307 - DNA, 21 bp, synthetic construct
  misc_feature 1..21: note = Description of Artificial Sequence: Synthetic oligonucleotide
  source 1..21: mol_type = other DNA
  modified_base 1: mod_base = OTHER; note = 2'-fluoro nucleotide
  modified_base 2: mod_base = OTHER; note = 2'-fluoro nucleotide
  modified_base 3: mod_base = OTHER; note = 2'-O-Methyl nucleotide
  modified_base 4: mod_base = OTHER; note = 2'-fluoro nucleotide
  modified_base 5: mod_base = OTHER; note = 2'-O-Methyl nucleotide
  modified_base 6: mod_base = OTHER; note = 2'-fluoro nucleotide
  modified_base 7: mod_base = OTHER; note = 2'-O-Methyl nucleotide
  modified_base 8: mod_base = OTHER; note = 2'-fluoro nucleotide
  modified_base 9: mod_base = OTHER; note = 2'-O-Methyl nucleotide
  modified_base 10: mod_base = OTHER; note = 2'-fluoro nucleotide
  modified_base 11: mod_base = OTHER; note = 2'-O-Methyl nucleotide
  modified_base 12: mod_base = OTHER; note = 2'-fluoro nucleotide
  modified_base 13: mod_base = OTHER; note = 2'-O-Methyl nucleotide
  modified_base 14: mod_base = OTHER; note = 2'-fluoro nucleotide
  modified_base 15: mod_base = OTHER; note = 2'-O-Methyl nucleotide
  modified_base 16: mod_base = OTHER; note = 2'-fluoro nucleotide
  modified_base 17: mod_base = OTHER; note = 2'-O-Methyl nucleotide
  modified_base 18: mod_base = OTHER; note = 2'-fluoro nucleotide
  modified_base 19: mod_base = OTHER; note = 2'-O-Methyl nucleotide
  modified_base 20: mod_base = OTHER; note = deoxy-thymine phosphorothioate
  misc_feature 1..19: note = RNA
  misc_feature 20..21: note = DNA
tcaaaagtgcccaactgcgtt

SEQ ID NO: 1308 - DNA, 21 bp, synthetic construct
  misc_feature 1..21: note = Description of Artificial Sequence: Synthetic oligonucleotide
  source 1..21: mol_type = other DNA
  modified_base 1: mod_base = OTHER; note = 2'-O-Methyl nucleotide
  modified_base 2: mod_base = OTHER; note = 2'-O-Methyl nucleotide
  modified_base 3: mod_base = OTHER; note = 2'-fluoro nucleotide
  modified_base 4: mod_base = OTHER; note = 2'-O-Methyl nucleotide
  modified_base 5: mod_base = OTHER; note = 2'-fluoro nucleotide
  modified_base 6: mod_base = OTHER; note = 2'-O-Methyl nucleotide
  modified_base 7: mod_base = OTHER; note = 2'-fluoro nucleotide
  modified_base 8: mod_base = OTHER; note = 2'-O-Methyl nucleotide
  modified_base 9: mod_base = OTHER; note = 2'-fluoro nucleotide
  modified_base 10: mod_base = OTHER; note = 2'-O-Methyl nucleotide
  modified_base 11: mod_base = OTHER; note = 2'-fluoro nucleotide
  modified_base 12: mod_base = OTHER; note = 2'-O-Methyl nucleotide
  modified_base 13: mod_base = OTHER; note = 2'-fluoro nucleotide
  modified_base 14: mod_base = OTHER; note = 2'-O-Methyl nucleotide
  modified_base 15: mod_base = OTHER; note = 2'-fluoro nucleotide
  modified_base 16: mod_base = OTHER; note = 2'-O-Methyl nucleotide
  modified_base 17: mod_base = OTHER; note = 2'-fluoro nucleotide
  modified_base 18: mod_base = OTHER; note = 2'-O-Methyl nucleotide
  modified_base 19: mod_base = OTHER; note = 2'-fluoro nucleotide
  modified_base 20: mod_base = OTHER; note = deoxy-thymine phosphorothioate
  misc_feature 1..19: note = RNA
  misc_feature 20..21: note = DNA
gcagttgggcacttttgaatt

SEQ ID NO: 1309 - DNA, 21 bp, synthetic construct
  misc_feature 1..21: note = Description of Artificial Sequence: Synthetic oligonucleotide
  source 1..21: mol_type = other DNA
  modified_base 1: mod_base = OTHER; note = 2'-fluoro nucleotide
  modified_base 2: mod_base = OTHER; note = 2'-fluoro nucleotide
  modified_base 3: mod_base = OTHER; note = 2'-O-Methyl nucleotide
  modified_base 4: mod_base = OTHER; note = 2'-fluoro nucleotide
  modified_base 5: mod_base = OTHER; note = 2'-O-Methyl nucleotide
  modified_base 6: mod_base = OTHER; note = 2'-fluoro nucleotide
  modified_base 7: mod_base = OTHER; note = 2'-O-Methyl nucleotide
  modified_base 8: mod_base = OTHER; note = 2'-fluoro nucleotide
  modified_base 9: mod_base = OTHER; note = 2'-O-Methyl nucleotide
  modified_base 10: mod_base = OTHER; note = 2'-fluoro nucleotide
  modified_base 11: mod_base = OTHER; note = 2'-O-Methyl nucleotide
  modified_base 12: mod_base = OTHER; note = 2'-fluoro nucleotide
  modified_base 13: mod_base = OTHER; note = 2'-O-Methyl nucleotide
  modified_base 14: mod_base = OTHER; note = 2'-fluoro nucleotide
  modified_base 15: mod_base = OTHER; note = 2'-O-Methyl nucleotide
  modified_base 16: mod_base = OTHER; note = 2'-fluoro nucleotide
  modified_base 17: mod_base = OTHER; note = 2'-O-Methyl nucleotide
  modified_base 18: mod_base = OTHER; note = 2'-fluoro nucleotide
  modified_base 19: mod_base = OTHER; note = 2'-O-Methyl nucleotide
  modified_base 20: mod_base = OTHER; note = deoxy-thymine phosphorothioate
  misc_feature 1..19: note = RNA
  misc_feature 20..21: note = DNA
ttcaaaagtgcccaactgctt

SEQ ID NO: 1310 - DNA, 21 bp, synthetic construct
  misc_feature 1..21: note = Description of Artificial Sequence: Synthetic oligonucleotide
  source 1..21: mol_type = other DNA
  modified_base 1: mod_base = OTHER; note = 2'-O-Methyl nucleotide
  modified_base 2: mod_base = OTHER; note = 2'-O-Methyl nucleotide
  modified_base 3: mod_base = OTHER; note = 2'-fluoro nucleotide
  modified_base 4: mod_base = OTHER; note = 2'-O-Methyl nucleotide
  modified_base 5: mod_base = OTHER; note = 2'-fluoro nucleotide
  modified_base 6: mod_base = OTHER; note = 2'-O-Methyl nucleotide
  modified_base 7: mod_base = OTHER; note = 2'-fluoro nucleotide
  modified_base 8: mod_base = OTHER; note = 2'-O-Methyl nucleotide
  modified_base 9: mod_base = OTHER; note = 2'-fluoro nucleotide
  modified_base 10: mod_base = OTHER; note = 2'-O-Methyl nucleotide
  modified_base 11: mod_base = OTHER; note = 2'-fluoro nucleotide
  modified_base 12: mod_base = OTHER; note = 2'-O-Methyl nucleotide
  modified_base 13: mod_base = OTHER; note = 2'-fluoro nucleotide
  modified_base 14: mod_base = OTHER; note = 2'-O-Methyl nucleotide
  modified_base 15: mod_base = OTHER; note = 2'-fluoro nucleotide
  modified_base 16: mod_base = OTHER; note = 2'-O-Methyl nucleotide
  modified_base 17: mod_base = OTHER; note = 2'-fluoro nucleotide
  modified_base 18: mod_base = OTHER; note = 2'-O-Methyl nucleotide
  modified_base 19: mod_base = OTHER; note = 2'-fluoro nucleotide
  modified_base 20: mod_base = OTHER; note = deoxy-thymine phosphorothioate
  misc_feature 1..19: note = RNA
  misc_feature 20..21: note = DNA
cagttgggcacttttgaagtt

SEQ ID NO: 1311 - DNA, 21 bp, synthetic construct
  misc_feature 1..21: note = Description of Artificial Sequence: Synthetic oligonucleotide
  source 1..21: mol_type = other DNA
  modified_base 1: mod_base = OTHER; note = 2'-fluoro nucleotide
  modified_base 2: mod_base = OTHER; note = 2'-fluoro nucleotide
  modified_base 3: mod_base = OTHER; note = 2'-O-Methyl nucleotide
  modified_base 4: mod_base = OTHER; note = 2'-fluoro nucleotide
  modified_base 5: mod_base = OTHER; note = 2'-O-Methyl nucleotide
  modified_base 6: mod_base = OTHER; note = 2'-fluoro nucleotide
  modified_base 7: mod_base = OTHER; note = 2'-O-Methyl nucleotide
  modified_base 8: mod_base = OTHER; note = 2'-fluoro nucleotide
  modified_base 9: mod_base = OTHER; note = 2'-O-Methyl nucleotide
  modified_base 10: mod_base = OTHER; note = 2'-fluoro nucleotide
  modified_base 11: mod_base = OTHER; note = 2'-O-Methyl nucleotide
  modified_base 12: mod_base = OTHER; note = 2'-fluoro nucleotide
  modified_base 13: mod_base = OTHER; note = 2'-O-Methyl nucleotide
  modified_base 14: mod_base = OTHER; note = 2'-fluoro nucleotide
  modified_base 15: mod_base = OTHER; note = 2'-O-Methyl nucleotide
  modified_base 16: mod_base = OTHER; note = 2'-fluoro nucleotide
  modified_base 17: mod_base = OTHER; note = 2'-O-Methyl nucleotide
  modified_base 18: mod_base = OTHER; note = 2'-fluoro nucleotide
  modified_base 19: mod_base = OTHER; note = 2'-O-Methyl nucleotide
  modified_base 20: mod_base = OTHER; note = deoxy-thymine phosphorothioate
  misc_feature 1..19: note = RNA
  misc_feature 20..21: note = DNA
cttcaaaagtgcccaactgtt

SEQ ID NO: 1312 - DNA, 21 bp, synthetic construct
  misc_feature 1..21: note = Description of Artificial Sequence: Synthetic oligonucleotide
  source 1..21: mol_type = other DNA
  modified_base 1: mod_base = OTHER; note = 2'-O-Methyl nucleotide
  modified_base 2: mod_base = OTHER; note = 2'-O-Methyl nucleotide
  modified_base 3: mod_base = OTHER; note = 2'-fluoro nucleotide
  modified_base 4: mod_base = OTHER; note = 2'-O-Methyl nucleotide
  modified_base 5: mod_base = OTHER; note = 2'-fluoro nucleotide
  modified_base 6: mod_base = OTHER; note = 2'-O-Methyl nucleotide
  modified_base 7: mod_base = OTHER; note = 2'-fluoro nucleotide
  modified_base 8: mod_base = OTHER; note = 2'-O-Methyl nucleotide
  modified_base 9: mod_base = OTHER; note = 2'-fluoro nucleotide
  modified_base 10: mod_base = OTHER; note = 2'-O-Methyl nucleotide
  modified_base 11: mod_base = OTHER; note = 2'-fluoro nucleotide
  modified_base 12: mod_base = OTHER; note = 2'-O-Methyl nucleotide
  modified_base 13: mod_base = OTHER; note = 2'-fluoro nucleotide
  modified_base 14: mod_base = OTHER; note = 2'-O-Methyl nucleotide
  modified_base 15: mod_base = OTHER; note = 2'-fluoro nucleotide
  modified_base 16: mod_base = OTHER; note = 2'-O-Methyl nucleotide
  modified_base 17: mod_base = OTHER; note = 2'-fluoro nucleotide
  modified_base 18: mod_base = OTHER; note = 2'-O-Methyl nucleotide
  modified_base 19: mod_base = OTHER; note = 2'-fluoro nucleotide
  modified_base 20: mod_base = OTHER; note = deoxy-thymine phosphorothioate
  misc_feature 1..19: note = RNA
  misc_feature 20..21: note = DNA
agttgggcacttttgaagatt

SEQ ID NO: 1313 - DNA, 21 bp, synthetic construct
  misc_feature 1..21: note = Description of Artificial Sequence: Synthetic oligonucleotide
  source 1..21: mol_type = other DNA
  modified_base 1: mod_base = OTHER; note = 2'-fluoro nucleotide
  modified_base 2: mod_base = OTHER; note = 2'-fluoro nucleotide
  modified_base 3: mod_base = OTHER; note = 2'-O-Methyl nucleotide
  modified_base 4: mod_base = OTHER; note = 2'-fluoro nucleotide
  modified_base 5: mod_base = OTHER; note = 2'-O-Methyl nucleotide
  modified_base 6: mod_base = OTHER; note = 2'-fluoro nucleotide
  modified_base 7: mod_base = OTHER; note = 2'-O-Methyl nucleotide
  modified_base 8: mod_base = OTHER; note = 2'-fluoro nucleotide
  modified_base 9: mod_base = OTHER; note = 2'-O-Methyl nucleotide
  modified_base 10: mod_base = OTHER; note = 2'-fluoro nucleotide
  modified_base 11: mod_base = OTHER; note = 2'-O-Methyl nucleotide
  modified_base 12: mod_base = OTHER; note = 2'-fluoro nucleotide
  modified_base 13: mod_base = OTHER; note = 2'-O-Methyl nucleotide
  modified_base 14: mod_base = OTHER; note = 2'-fluoro nucleotide
  modified_base 15: mod_base = OTHER; note = 2'-O-Methyl nucleotide
  modified_base 16: mod_base = OTHER; note = 2'-fluoro nucleotide
  modified_base 17: mod_base = OTHER; note = 2'-O-Methyl nucleotide
  modified_base 18: mod_base = OTHER; note = 2'-fluoro nucleotide
  modified_base 19: mod_base = OTHER; note = 2'-O-Methyl nucleotide
  modified_base 20: mod_base = OTHER; note = deoxy-thymine phosphorothioate
  misc_feature 1..19: note = RNA
  misc_feature 20..21: note = DNA
tcttcaaaagtgcccaacttt

SEQ ID NO: 1314 - DNA, 21 bp, synthetic construct
  misc_feature 1..21: note = Description of Artificial Sequence: Synthetic oligonucleotide
  source 1..21: mol_type = other DNA
  modified_base 1: mod_base = OTHER; note = 2'-O-Methyl nucleotide
  modified_base 2: mod_base = OTHER; note = 2'-O-Methyl nucleotide
  modified_base 3: mod_base = OTHER; note = 2'-fluoro nucleotide
  modified_base 4: mod_base = OTHER; note = 2'-O-Methyl nucleotide
  modified_base 5: mod_base = OTHER; note = 2'-fluoro nucleotide
  modified_base 6: mod_base = OTHER; note = 2'-O-Methyl nucleotide
  modified_base 7: mod_base = OTHER; note = 2'-fluoro nucleotide
  modified_base 8: mod_base = OTHER; note = 2'-O-Methyl nucleotide
  modified_base 9: mod_base = OTHER; note = 2'-fluoro nucleotide
  modified_base 10: mod_base = OTHER; note = 2'-O-Methyl nucleotide
  modified_base 11: mod_base = OTHER; note = 2'-fluoro nucleotide
  modified_base 12: mod_base = OTHER; note = 2'-O-Methyl nucleotide
  modified_base 13: mod_base = OTHER; note = 2'-fluoro nucleotide
  modified_base 14: mod_base = OTHER; note = 2'-O-Methyl nucleotide
  modified_base 15: mod_base = OTHER; note = 2'-fluoro nucleotide
  modified_base 16: mod_base = OTHER; note = 2'-O-Methyl nucleotide
  modified_base 17: mod_base = OTHER; note = 2'-fluoro nucleotide
  modified_base 18: mod_base = OTHER; note = 2'-O-Methyl nucleotide
  modified_base 19: mod_base = OTHER; note = 2'-fluoro nucleotide
  modified_base 20: mod_base = OTHER; note = deoxy-thymine phosphorothioate
  misc_feature 1..19: note = RNA
  misc_feature 20..21: note = DNA
gttgggcacttttgaagattt

SEQ ID NO: 1315 - DNA, 21 bp, synthetic construct
  misc_feature 1..21: note = Description of Artificial Sequence: Synthetic oligonucleotide
  source 1..21: mol_type = other DNA
  modified_base 1: mod_base = OTHER; note = 2'-fluoro nucleotide
  modified_base 2: mod_base = OTHER; note = 2'-fluoro nucleotide
  modified_base 3: mod_base = OTHER; note = 2'-O-Methyl nucleotide
  modified_base 4: mod_base = OTHER; note = 2'-fluoro nucleotide
  modified_base 5: mod_base = OTHER; note = 2'-O-Methyl nucleotide
  modified_base 6: mod_base = OTHER; note = 2'-fluoro nucleotide
  modified_base 7: mod_base = OTHER; note = 2'-O-Methyl nucleotide
  modified_base 8: mod_base = OTHER; note = 2'-fluoro nucleotide
  modified_base 9: mod_base = OTHER; note = 2'-O-Methyl nucleotide
  modified_base 10: mod_base = OTHER; note = 2'-fluoro nucleotide
  modified_base 11: mod_base = OTHER; note = 2'-O-Methyl nucleotide
  modified_base 12: mod_base = OTHER; note = 2'-fluoro nucleotide
  modified_base 13: mod_base = OTHER; note = 2'-O-Methyl nucleotide
  modified_base 14: mod_base = OTHER; note = 2'-fluoro nucleotide
  modified_base 15: mod_base = OTHER; note = 2'-O-Methyl nucleotide
  modified_base 16: mod_base = OTHER; note = 2'-fluoro nucleotide
  modified_base 17: mod_base = OTHER; note = 2'-O-Methyl nucleotide
  modified_base 18: mod_base = OTHER; note = 2'-fluoro nucleotide
  modified_base 19: mod_base = OTHER; note = 2'-O-Methyl nucleotide
  modified_base 20: mod_base = OTHER; note = deoxy-thymine phosphorothioate
  misc_feature 1..19: note = RNA
  misc_feature 20..21: note = DNA
atcttcaaaagtgcccaactt

SEQ ID NO: 1316 - DNA, 21 bp, synthetic construct
  misc_feature 1..21: note = Description of Artificial Sequence: Synthetic oligonucleotide
  source 1..21: mol_type = other DNA
  modified_base 1: mod_base = OTHER; note = 2'-O-Methyl nucleotide
  modified_base 2: mod_base = OTHER; note = 2'-O-Methyl nucleotide
  modified_base 3: mod_base = OTHER; note = 2'-fluoro nucleotide
  modified_base 4: mod_base = OTHER; note = 2'-O-Methyl nucleotide
  modified_base 5: mod_base = OTHER; note = 2'-fluoro nucleotide
  modified_base 6: mod_base = OTHER; note = 2'-O-Methyl nucleotide
  modified_base 7: mod_base = OTHER; note = 2'-fluoro nucleotide
  modified_base 8: mod_base = OTHER; note = 2'-O-Methyl nucleotide
  modified_base 9: mod_base = OTHER; note = 2'-fluoro nucleotide
  modified_base 10: mod_base = OTHER; note = 2'-O-Methyl nucleotide
  modified_base 11: mod_base = OTHER; note = 2'-fluoro nucleotide
  modified_base 12: mod_base = OTHER; note = 2'-O-Methyl nucleotide
  modified_base 13: mod_base = OTHER; note = 2'-fluoro nucleotide
  modified_base 14: mod_base = OTHER; note = 2'-O-Methyl nucleotide
  modified_base 15: mod_base = OTHER; note = 2'-fluoro nucleotide
  modified_base 16: mod_base = OTHER; note = 2'-O-Methyl nucleotide
  modified_base 17: mod_base = OTHER; note = 2'-fluoro nucleotide
  modified_base 18: mod_base = OTHER; note = 2'-O-Methyl nucleotide
  modified_base 19: mod_base = OTHER; note = 2'-fluoro nucleotide
  modified_base 20: mod_base = OTHER; note = deoxy-thymine phosphorothioate
  misc_feature 1..19: note = RNA
  misc_feature 20..21: note = DNA
ttgggcacttttgaagatctt

SEQ ID NO: 1317 - DNA, 21 bp, synthetic construct
  misc_feature 1..21: note = Description of Artificial Sequence: Synthetic oligonucleotide
  source 1..21: mol_type = other DNA
  modified_base 1: mod_base = OTHER; note = 2'-fluoro nucleotide
  modified_base 2: mod_base = OTHER; note = 2'-fluoro nucleotide
  modified_base 3: mod_base = OTHER; note = 2'-O-Methyl nucleotide
  modified_base 4: mod_base = OTHER; note = 2'-fluoro nucleotide
  modified_base 5: mod_base = OTHER; note = 2'-O-Methyl nucleotide
  modified_base 6: mod_base = OTHER; note = 2'-fluoro nucleotide
  modified_base 7: mod_base = OTHER; note = 2'-O-Methyl nucleotide
  modified_base 8: mod_base = OTHER; note = 2'-fluoro nucleotide
  modified_base 9: mod_base = OTHER; note = 2'-O-Methyl nucleotide
  modified_base 10: mod_base = OTHER; note = 2'-fluoro nucleotide
  modified_base 11: mod_base = OTHER; note = 2'-O-Methyl nucleotide
  modified_base 12: mod_base = OTHER; note = 2'-fluoro nucleotide
  modified_base 13: mod_base = OTHER; note = 2'-O-Methyl nucleotide
  modified_base 14: mod_base = OTHER; note = 2'-fluoro nucleotide
  modified_base 15: mod_base = OTHER; note = 2'-O-Methyl nucleotide
  modified_base 16: mod_base = OTHER; note = 2'-fluoro nucleotide
  modified_base 17: mod_base = OTHER; note = 2'-O-Methyl nucleotide
  modified_base 18: mod_base = OTHER; note = 2'-fluoro nucleotide
  modified_base 19: mod_base = OTHER; note = 2'-O-Methyl nucleotide
  modified_base 20: mod_base = OTHER; note = deoxy-thymine phosphorothioate
  misc_feature 1..19: note = RNA
  misc_feature 20..21: note = DNA
gatcttcaaaagtgcccaatt

SEQ ID NO: 1318 - DNA, 21 bp, synthetic construct
  misc_feature 1..21: note = Description of Artificial Sequence: Synthetic oligonucleotide
  source 1..21: mol_type = other DNA
  modified_base 1: mod_base = OTHER; note = 2'-O-Methyl nucleotide
  modified_base 2: mod_base = OTHER; note = 2'-O-Methyl nucleotide
  modified_base 3: mod_base = OTHER; note = 2'-fluoro nucleotide
  modified_base 4: mod_base = OTHER; note = 2'-O-Methyl nucleotide
  modified_base 5: mod_base = OTHER; note = 2'-fluoro nucleotide
  modified_base 6: mod_base = OTHER; note = 2'-O-Methyl nucleotide
  modified_base 7: mod_base = OTHER; note = 2'-fluoro nucleotide
  modified_base 8: mod_base = OTHER; note = 2'-O-Methyl nucleotide
  modified_base 9: mod_base = OTHER; note = 2'-fluoro nucleotide
  modified_base 10: mod_base = OTHER; note = 2'-O-Methyl nucleotide
  modified_base 11: mod_base = OTHER; note = 2'-fluoro nucleotide
  modified_base 12: mod_base = OTHER; note = 2'-O-Methyl nucleotide
  modified_base 13: mod_base = OTHER; note = 2'-fluoro nucleotide
  modified_base 14: mod_base = OTHER; note = 2'-O-Methyl nucleotide
  modified_base 15: mod_base = OTHER; note = 2'-fluoro nucleotide
  modified_base 16: mod_base = OTHER; note = 2'-O-Methyl nucleotide
  modified_base 17: mod_base = OTHER; note = 2'-fluoro nucleotide
  modified_base 18: mod_base = OTHER; note = 2'-O-Methyl nucleotide
  modified_base 19: mod_base = OTHER; note = 2'-fluoro nucleotide
  modified_base 20: mod_base = OTHER; note = deoxy-thymine phosphorothioate
  misc_feature 1..19: note = RNA
  misc_feature 20..21: note = DNA
tgggcacttttgaagatcatt

SEQ ID NO: 1319 - DNA, 21 bp, synthetic construct
  misc_feature 1..21: note = Description of Artificial Sequence: Synthetic oligonucleotide
  source 1..21: mol_type = other DNA
  modified_base 1: mod_base = OTHER; note = 2'-fluoro nucleotide
  modified_base 2: mod_base = OTHER; note = 2'-fluoro nucleotide
  modified_base 3: mod_base = OTHER; note = 2'-O-Methyl nucleotide
  modified_base 4: mod_base = OTHER; note = 2'-fluoro nucleotide
  modified_base 5: mod_base = OTHER; note = 2'-O-Methyl nucleotide
  modified_base 6: mod_base = OTHER; note = 2'-fluoro nucleotide
  modified_base 7: mod_base = OTHER; note = 2'-O-Methyl nucleotide
  modified_base 8: mod_base = OTHER; note = 2'-fluoro nucleotide
  modified_base 9: mod_base = OTHER; note = 2'-O-Methyl nucleotide
  modified_base 10: mod_base = OTHER; note = 2'-fluoro nucleotide
  modified_base 11: mod_base = OTHER; note = 2'-O-Methyl nucleotide
  modified_base 12: mod_base = OTHER; note = 2'-fluoro nucleotide
  modified_base 13: mod_base = OTHER; note = 2'-O-Methyl nucleotide
  modified_base 14: mod_base = OTHER; note = 2'-fluoro nucleotide
  modified_base 15: mod_base = OTHER; note = 2'-O-Methyl nucleotide
  modified_base 16: mod_base = OTHER; note = 2'-fluoro nucleotide
  modified_base 17: mod_base = OTHER; note = 2'-O-Methyl nucleotide
  modified_base 18: mod_base = OTHER; note = 2'-fluoro nucleotide
  modified_base 19: mod_base = OTHER; note = 2'-O-Methyl nucleotide
  modified_base 20: mod_base = OTHER; note = deoxy-thymine phosphorothioate
  misc_feature 1..19: note = RNA
  misc_feature 20..21: note = DNA
tgatcttcaaaagtgcccatt

SEQ ID NO: 1320 - DNA, 21 bp, synthetic construct
  misc_feature 1..21: note = Description of Artificial Sequence: Synthetic oligonucleotide
  source 1..21: mol_type = other DNA
  modified_base 1: mod_base = OTHER; note = 2'-O-Methyl nucleotide
  modified_base 2: mod_base = OTHER; note = 2'-O-Methyl nucleotide
  modified_base 3: mod_base = OTHER; note = 2'-fluoro nucleotide
  modified_base 4: mod_base = OTHER; note = 2'-O-Methyl nucleotide
  modified_base 5: mod_base = OTHER; note = 2'-fluoro nucleotide
  modified_base 6: mod_base = OTHER; note = 2'-O-Methyl nucleotide
  modified_base 7: mod_base = OTHER; note = 2'-fluoro nucleotide
  modified_base 8: mod_base = OTHER; note = 2'-O-Methyl nucleotide
  modified_base 9: mod_base = OTHER; note = 2'-fluoro nucleotide
  modified_base 10: mod_base = OTHER; note = 2'-O-Methyl nucleotide
  modified_base 11: mod_base = OTHER; note = 2'-fluoro nucleotide
  modified_base 12: mod_base = OTHER; note = 2'-O-Methyl nucleotide
  modified_base 13: mod_base = OTHER; note = 2'-fluoro nucleotide
  modified_base 14: mod_base = OTHER; note = 2'-O-Methyl nucleotide
  modified_base 15: mod_base = OTHER; note = 2'-fluoro nucleotide
  modified_base 16: mod_base = OTHER; note = 2'-O-Methyl nucleotide
  modified_base 17: mod_base = OTHER; note = 2'-fluoro nucleotide
  modified_base 18: mod_base = OTHER; note = 2'-O-Methyl nucleotide
  modified_base 19: mod_base = OTHER; note = 2'-fluoro nucleotide
  modified_base 20: mod_base = OTHER; note = deoxy-thymine phosphorothioate
  misc_feature 1..19: note = RNA
  misc_feature 20..21: note = DNA
gggcacttttgaagatcattt

SEQ ID NO: 1321 - DNA, 21 bp, synthetic construct
  misc_feature 1..21: note = Description of Artificial Sequence: Synthetic oligonucleotide
  source 1..21: mol_type = other DNA
  modified_base 1: mod_base = OTHER; note = 2'-fluoro nucleotide
  modified_base 2: mod_base = OTHER; note = 2'-fluoro nucleotide
  modified_base 3: mod_base = OTHER; note = 2'-O-Methyl nucleotide
  modified_base 4: mod_base = OTHER; note = 2'-fluoro nucleotide
  modified_base 5: mod_base = OTHER; note = 2'-O-Methyl nucleotide
  modified_base 6: mod_base = OTHER; note = 2'-fluoro nucleotide
  modified_base 7: mod_base = OTHER; note = 2'-O-Methyl nucleotide
  modified_base 8: mod_base = OTHER; note = 2'-fluoro nucleotide
  modified_base 9: mod_base = OTHER; note = 2'-O-Methyl nucleotide
  modified_base 10: mod_base = OTHER; note = 2'-fluoro nucleotide
  modified_base 11: mod_base = OTHER; note = 2'-O-Methyl nucleotide
  modified_base 12: mod_base = OTHER; note = 2'-fluoro nucleotide
  modified_base 13: mod_base = OTHER; note = 2'-O-Methyl nucleotide
  modified_base 14: mod_base = OTHER; note = 2'-fluoro nucleotide
  modified_base 15: mod_base = OTHER; note = 2'-O-Methyl nucleotide
  modified_base 16: mod_base = OTHER; note = 2'-fluoro nucleotide
  modified_base 17: mod_base = OTHER; note = 2'-O-Methyl nucleotide
  modified_base 18: mod_base = OTHER; note = 2'-fluoro nucleotide
  modified_base 19: mod_base = OTHER; note = 2'-O-Methyl nucleotide
  modified_base 20: mod_base = OTHER; note = deoxy-thymine phosphorothioate
  misc_feature 1..19: note = RNA
  misc_feature 20..21: note = DNA
atgatcttcaaaagtgccctt

SEQ ID NO: 1322 - DNA, 21 bp, synthetic construct
  misc_feature 1..21: note = Description of Artificial Sequence: Synthetic oligonucleotide
  source 1..21: mol_type = other DNA
  modified_base 1: mod_base = OTHER; note = 2'-O-Methyl nucleotide
  modified_base 2: mod_base = OTHER; note = 2'-O-Methyl nucleotide
  modified_base 3: mod_base = OTHER; note = 2'-fluoro nucleotide
  modified_base 4: mod_base = OTHER; note = 2'-O-Methyl nucleotide
  modified_base 5: mod_base = OTHER; note = 2'-fluoro nucleotide
  modified_base 6: mod_base = OTHER; note = 2'-O-Methyl nucleotide
  modified_base 7: mod_base = OTHER; note = 2'-fluoro nucleotide
  modified_base 8: mod_base = OTHER; note = 2'-O-Methyl nucleotide
  modified_base 9: mod_base = OTHER; note = 2'-fluoro nucleotide
  modified_base 10: mod_base = OTHER; note = 2'-O-Methyl nucleotide
  modified_base 11: mod_base = OTHER; note = 2'-fluoro nucleotide
  modified_base 12: mod_base = OTHER; note = 2'-O-Methyl nucleotide
  modified_base 13: mod_base = OTHER; note = 2'-fluoro nucleotide
  modified_base 14: mod_base = OTHER; note = 2'-O-Methyl nucleotide
  modified_base 15: mod_base = OTHER; note = 2'-fluoro nucleotide
  modified_base 16: mod_base = OTHER; note = 2'-O-Methyl nucleotide
  modified_base 17: mod_base = OTHER; note = 2'-fluoro nucleotide
  modified_base 18: mod_base = OTHER; note = 2'-O-Methyl nucleotide
  modified_base 19: mod_base = OTHER; note = 2'-fluoro nucleotide
  modified_base 20: mod_base = OTHER; note = deoxy-thymine phosphorothioate
  misc_feature 1..19: note = RNA
  misc_feature 20..21: note = DNA
ttgaagatcattttctcagtt

SEQ ID NO: 1323 - DNA, 21 bp, synthetic construct
  misc_feature 1..21: note = Description of Artificial Sequence: Synthetic oligonucleotide
  source 1..21: mol_type = other DNA
  modified_base 1: mod_base = OTHER; note = 2'-fluoro nucleotide
  modified_base 2: mod_base = OTHER; note = 2'-fluoro nucleotide
  modified_base 3: mod_base = OTHER; note = 2'-O-Methyl nucleotide
  modified_base 4: mod_base = OTHER; note = 2'-fluoro nucleotide
  modified_base 5: mod_base = OTHER; note = 2'-O-Methyl nucleotide
  modified_base 6: mod_base = OTHER; note = 2'-fluoro nucleotide
  modified_base 7: mod_base = OTHER; note = 2'-O-Methyl nucleotide
  modified_base 8: mod_base = OTHER; note = 2'-fluoro nucleotide
  modified_base 9: mod_base = OTHER; note = 2'-O-Methyl nucleotide
  modified_base 10: mod_base = OTHER; note = 2'-fluoro nucleotide
  modified_base 11: mod_base = OTHER; note = 2'-O-Methyl nucleotide
  modified_base 12: mod_base = OTHER; note = 2'-fluoro nucleotide
  modified_base 13: mod_base = OTHER; note = 2'-O-Methyl nucleotide
  modified_base 14: mod_base = OTHER; note = 2'-fluoro nucleotide
  modified_base 15: mod_base = OTHER; note = 2'-O-Methyl nucleotide
  modified_base 16: mod_base = OTHER; note = 2'-fluoro nucleotide
  modified_base 17: mod_base = OTHER; note = 2'-O-Methyl nucleotide
  modified_base 18: mod_base = OTHER; note = 2'-fluoro nucleotide
  modified_base 19: mod_base = OTHER; note = 2'-O-Methyl nucleotide
  modified_base 20: mod_base = OTHER; note = deoxy-thymine phosphorothioate
  misc_feature 1..19: note = RNA
  misc_feature 20..21: note = DNA
ctgagaaaatgatcttcaatt

SEQ ID NO: 1324 - DNA, 21 bp, synthetic construct
  misc_feature 1..21: note = Description of Artificial Sequence: Synthetic oligonucleotide
  source 1..21: mol_type = other DNA
  modified_base 1: mod_base = OTHER; note = 2'-O-Methyl nucleotide
  modified_base 2: mod_base = OTHER; note = 2'-O-Methyl nucleotide
  modified_base 3: mod_base = OTHER; note = 2'-fluoro nucleotide
  modified_base 4: mod_base = OTHER; note = 2'-O-Methyl nucleotide
  modified_base 5: mod_base = OTHER; note = 2'-fluoro nucleotide
  modified_base 6: mod_base = OTHER; note = 2'-O-Methyl nucleotide
  modified_base 7: mod_base = OTHER; note = 2'-fluoro nucleotide
  modified_base 8: mod_base = OTHER; note = 2'-O-Methyl nucleotide
  modified_base 9: mod_base = OTHER; note = 2'-fluoro nucleotide
  modified_base 10: mod_base = OTHER; note = 2'-O-Methyl nucleotide
  modified_base 11: mod_base = OTHER; note = 2'-fluoro nucleotide
  modified_base 12: mod_base = OTHER; note = 2'-O-Methyl nucleotide
  modified_base 13: mod_base = OTHER; note = 2'-fluoro nucleotide
  modified_base 14: mod_base = OTHER; note = 2'-O-Methyl nucleotide
  modified_base 15: mod_base = OTHER; note = 2'-fluoro nucleotide
  modified_base 16: mod_base = OTHER; note = 2'-O-Methyl nucleotide
  modified_base 17: mod_base = OTHER; note = 2'-fluoro nucleotide
  modified_base 18: mod_base = OTHER; note = 2'-O-Methyl nucleotide
  modified_base 19: mod_base = OTHER; note = 2'-fluoro nucleotide
  modified_base 20: mod_base = OTHER; note = deoxy-thymine phosphorothioate
  misc_feature 1..19: note = RNA
  misc_feature 20..21: note = DNA
gaagatcattttctcagcctt

SEQ ID NO: 1325 - DNA, 21 bp, synthetic construct
  misc_feature 1..21: note = Description of Artificial Sequence: Synthetic oligonucleotide
  source 1..21: mol_type = other DNA
  modified_base 1: mod_base = OTHER; note = 2'-fluoro nucleotide
  modified_base 2: mod_base = OTHER; note = 2'-fluoro nucleotide
  modified_base 3: mod_base = OTHER; note = 2'-O-Methyl nucleotide
  modified_base 4: mod_base = OTHER; note = 2'-fluoro nucleotide
  modified_base 5: mod_base = OTHER; note = 2'-O-Methyl nucleotide
  modified_base 6: mod_base = OTHER; note = 2'-fluoro nucleotide
  modified_base 7: mod_base = OTHER; note = 2'-O-Methyl nucleotide
  modified_base 8: mod_base = OTHER; note = 2'-fluoro nucleotide
  modified_base 9: mod_base = OTHER; note = 2'-O-Methyl nucleotide
  modified_base 10: mod_base = OTHER; note = 2'-fluoro nucleotide
  modified_base 11: mod_base = OTHER; note = 2'-O-Methyl nucleotide
  modified_base 12: mod_base = OTHER; note = 2'-fluoro nucleotide
  modified_base 13: mod_base = OTHER; note = 2'-O-Methyl nucleotide
  modified_base 14: mod_base = OTHER; note = 2'-fluoro nucleotide
  modified_base 15: mod_base = OTHER; note = 2'-O-Methyl nucleotide
  modified_base 16: mod_base = OTHER; note = 2'-fluoro nucleotide
  modified_base 17: mod_base = OTHER; note = 2'-O-Methyl nucleotide
  modified_base 18: mod_base = OTHER; note = 2'-fluoro nucleotide
  modified_base 19: mod_base = OTHER; note = 2'-O-Methyl nucleotide
  modified_base 20: mod_base = OTHER; note = deoxy-thymine phosphorothioate
  misc_feature 1..19: note = RNA
  misc_feature 20..21: note = DNA
ggctgagaaaatgatcttctt

SEQ ID NO: 1326 - DNA, 21 bp, synthetic construct
  misc_feature 1..21: note = Description of Artificial Sequence: Synthetic oligonucleotide
  source 1..21: mol_type = other DNA
  modified_base 1: mod_base = OTHER; note = 2'-O-Methyl nucleotide
  modified_base 2: mod_base = OTHER; note = 2'-O-Methyl nucleotide
  modified_base 3: mod_base = OTHER; note = 2'-fluoro nucleotide
  modified_base 4: mod_base = OTHER; note = 2'-O-Methyl nucleotide
  modified_base 5: mod_base = OTHER; note = 2'-fluoro nucleotide
  modified_base 6: mod_base = OTHER; note = 2'-O-Methyl nucleotide
  modified_base 7: mod_base = OTHER; note = 2'-fluoro nucleotide
  modified_base 8: mod_base = OTHER; note = 2'-O-Methyl nucleotide
  modified_base 9: mod_base = OTHER; note = 2'-fluoro nucleotide
  modified_base 10: mod_base = OTHER; note = 2'-O-Methyl nucleotide
  modified_base 11: mod_base = OTHER; note = 2'-fluoro nucleotide
  modified_base 12: mod_base = OTHER; note = 2'-O-Methyl nucleotide
  modified_base 13: mod_base = OTHER; note = 2'-fluoro nucleotide
  modified_base 14: mod_base = OTHER; note = 2'-O-Methyl nucleotide
  modified_base 15: mod_base = OTHER; note = 2'-fluoro nucleotide
  modified_base 16: mod_base = OTHER; note = 2'-O-Methyl nucleotide
  modified_base 17: mod_base = OTHER; note = 2'-fluoro nucleotide
  modified_base 18: mod_base = OTHER; note = 2'-O-Methyl nucleotide
  modified_base 19: mod_base = OTHER; note = 2'-fluoro nucleotide
  modified_base 20: mod_base = OTHER; note = deoxy-thymine phosphorothioate
  misc_feature 1..19: note = RNA
  misc_feature 20..21: note = DNA
aagatcattttctcagccttt

SEQ ID NO: 1327 - DNA, 21 bp, synthetic construct
  misc_feature 1..21: note = Description of Artificial Sequence: Synthetic oligonucleotide
  source 1..21: mol_type = other DNA
  modified_base 1: mod_base = OTHER; note = 2'-fluoro nucleotide
  modified_base 2: mod_base = OTHER; note = 2'-fluoro nucleotide
  modified_base 3: mod_base = OTHER; note = 2'-O-Methyl nucleotide
  modified_base 4: mod_base = OTHER; note = 2'-fluoro nucleotide
  modified_base 5: mod_base = OTHER; note = 2'-O-Methyl nucleotide
  modified_base 6: mod_base = OTHER; note = 2'-fluoro nucleotide
  modified_base 7: mod_base = OTHER; note = 2'-O-Methyl nucleotide
  modified_base 8: mod_base = OTHER; note = 2'-fluoro nucleotide
  modified_base 9: mod_base = OTHER; note = 2'-O-Methyl nucleotide
  modified_base 10: mod_base = OTHER; note = 2'-fluoro nucleotide
  modified_base 11: mod_base = OTHER; note = 2'-O-Methyl nucleotide
  modified_base 12: mod_base = OTHER; note = 2'-fluoro nucleotide
  modified_base 13: mod_base = OTHER; note = 2'-O-Methyl nucleotide
  modified_base 14: mod_base = OTHER; note = 2'-fluoro nucleotide
  modified_base 15: mod_base = OTHER; note = 2'-O-Methyl nucleotide
  modified_base 16: mod_base = OTHER; note = 2'-fluoro nucleotide
  modified_base 17: mod_base = OTHER; note = 2'-O-Methyl nucleotide
  modified_base 18: mod_base = OTHER; note = 2'-fluoro nucleotide
  modified_base 19: mod_base = OTHER; note = 2'-O-Methyl nucleotide
  modified_base 20: mod_base = OTHER; note = deoxy-thymine phosphorothioate
  misc_feature 1..19: note = RNA
  misc_feature 20..21: note = DNA
aggctgagaaaatgatctttt

SEQ ID NO: 1328 - DNA, 21 bp, synthetic construct
  misc_feature 1..21: note = Description of Artificial Sequence: Synthetic oligonucleotide
  source 1..21: mol_type = other DNA
  modified_base 1: mod_base = OTHER; note = 2'-O-Methyl nucleotide
  modified_base 2: mod_base = OTHER; note = 2'-O-Methyl nucleotide
  modified_base 3: mod_base = OTHER; note = 2'-fluoro nucleotide
  modified_base 4: mod_base = OTHER; note = 2'-O-Methyl nucleotide
  modified_base 5: mod_base = OTHER; note = 2'-fluoro nucleotide
  modified_base 6: mod_base = OTHER; note = 2'-O-Methyl nucleotide
  modified_base 7: mod_base = OTHER; note = 2'-fluoro nucleotide
  modified_base 8: mod_base = OTHER; note = 2'-O-Methyl nucleotide
  modified_base 9: mod_base = OTHER; note = 2'-fluoro nucleotide
  modified_base 10: mod_base = OTHER; note = 2'-O-Methyl nucleotide
  modified_base 11: mod_base = OTHER; note = 2'-fluoro nucleotide
  modified_base 12: mod_base = OTHER; note = 2'-O-Methyl nucleotide
  modified_base 13: mod_base = OTHER; note = 2'-fluoro nucleotide
  modified_base 14: mod_base = OTHER; note = 2'-O-Methyl nucleotide
  modified_base 15: mod_base = OTHER; note = 2'-fluoro nucleotide
  modified_base 16: mod_base = OTHER; note = 2'-O-Methyl nucleotide
  modified_base 17: mod_base = OTHER; note = 2'-fluoro nucleotide
  modified_base 18: mod_base = OTHER; note = 2'-O-Methyl nucleotide
  modified_base 19: mod_base = OTHER; note = 2'-fluoro nucleotide
  modified_base 20: mod_base = OTHER; note = deoxy-thymine phosphorothioate
  misc_feature 1..19: note = RNA
  misc_feature 20..21: note = DNA
cattttctcagcctccagatt

SEQ ID NO: 1329 - DNA, 21 bp, synthetic construct
  misc_feature 1..21: note = Description of Artificial Sequence: Synthetic oligonucleotide
  source 1..21: mol_type = other DNA
  modified_base 1: mod_base = OTHER; note = 2'-fluoro nucleotide
  modified_base 2: mod_base = OTHER; note = 2'-fluoro nucleotide
  modified_base 3: mod_base = OTHER; note = 2'-O-Methyl nucleotide
  modified_base 4: mod_base = OTHER; note = 2'-fluoro nucleotide
  modified_base 5: mod_base = OTHER; note = 2'-O-Methyl nucleotide
  modified_base 6: mod_base = OTHER; note = 2'-fluoro nucleotide
  modified_base 7: mod_base = OTHER; note = 2'-O-Methyl nucleotide
  modified_base 8: mod_base = OTHER; note = 2'-fluoro nucleotide
  modified_base 9: mod_base = OTHER; note = 2'-O-Methyl nucleotide
  modified_base 10: mod_base = OTHER; note = 2'-fluoro nucleotide
  modified_base 11: mod_base = OTHER; note = 2'-O-Methyl nucleotide
  modified_base 12: mod_base = OTHER; note = 2'-fluoro nucleotide
  modified_base 13: mod_base = OTHER; note = 2'-O-Methyl nucleotide
  modified_base 14: mod_base = OTHER; note = 2'-fluoro nucleotide
  modified_base 15: mod_base = OTHER; note = 2'-O-Methyl nucleotide
  modified_base 16: mod_base = OTHER; note = 2'-fluoro nucleotide
  modified_base 17: mod_base = OTHER; note = 2'-O-Methyl nucleotide
  modified_base 18: mod_base = OTHER; note = 2'-fluoro nucleotide
  modified_base 19: mod_base = OTHER; note = 2'-O-Methyl nucleotide
  modified_base 20: mod_base = OTHER; note = deoxy-thymine phosphorothioate
  misc_feature 1..19: note = RNA
  misc_feature 20..21: note = DNA
tctggaggctgagaaaatgtt

SEQ ID NO: 1330 - DNA, 21 bp, synthetic construct
  misc_feature 1..21: note = Description of Artificial Sequence: Synthetic oligonucleotide
  source 1..21: mol_type = other DNA
  modified_base 1: mod_base = OTHER; note = 2'-O-Methyl nucleotide
  modified_base 2: mod_base = OTHER; note = 2'-O-Methyl nucleotide
  modified_base 3: mod_base = OTHER; note = 2'-fluoro nucleotide
  modified_base 4: mod_base = OTHER; note = 2'-O-Methyl nucleotide
  modified_base 5: mod_base = OTHER; note = 2'-fluoro nucleotide
  modified_base 6: mod_base = OTHER; note = 2'-O-Methyl nucleotide
  modified_base 7: mod_base = OTHER; note = 2'-fluoro nucleotide
  modified_base 8: mod_base = OTHER; note = 2'-O-Methyl nucleotide
  modified_base 9: mod_base = OTHER; note = 2'-fluoro nucleotide
  modified_base 10: mod_base = OTHER; note = 2'-O-Methyl nucleotide
  modified_base 11: mod_base = OTHER; note = 2'-fluoro nucleotide
  modified_base 12: mod_base = OTHER; note = 2'-O-Methyl nucleotide
  modified_base 13: mod_base = OTHER; note = 2'-fluoro nucleotide
  modified_base 14: mod_base = OTHER; note = 2'-O-Methyl nucleotide
  modified_base 15: mod_base = OTHER; note = 2'-fluoro nucleotide
  modified_base 16: mod_base = OTHER; note = 2'-O-Methyl nucleotide
  modified_base 17: mod_base = OTHER; note = 2'-fluoro nucleotide
  modified_base 18: mod_base = OTHER; note = 2'-O-Methyl nucleotide
  modified_base 19: mod_base = OTHER; note = 2'-fluoro nucleotide
  modified_base 20: mod_base = OTHER; note = deoxy-thymine phosphorothioate
  misc_feature 1..19: note = RNA
  misc_feature 20..21: note = DNA
agcctccagaggatgttcatt

SEQ ID NO: 1331 - DNA, 21 bp, synthetic construct
  misc_feature 1..21: note = Description of Artificial Sequence: Synthetic oligonucleotide
  source 1..21: mol_type = other DNA
  modified_base 1: mod_base = OTHER; note = 2'-fluoro nucleotide
  modified_base 2: mod_base = OTHER; note = 2'-fluoro nucleotide
  modified_base 3: mod_base = OTHER; note = 2'-O-Methyl nucleotide
  modified_base 4: mod_base = OTHER; note = 2'-fluoro nucleotide
  modified_base 5: mod_base = OTHER; note = 2'-O-Methyl nucleotide
  modified_base 6: mod_base = OTHER; note = 2'-fluoro nucleotide
  modified_base 7: mod_base = OTHER; note = 2'-O-Methyl nucleotide
  modified_base 8: mod_base = OTHER; note = 2'-fluoro nucleotide
  modified_base 9: mod_base = OTHER; note = 2'-O-Methyl nucleotide
  modified_base 10: mod_base = OTHER; note = 2'-fluoro nucleotide
  modified_base 11: mod_base = OTHER; note = 2'-O-Methyl nucleotide
  modified_base 12: mod_base = OTHER; note = 2'-fluoro nucleotide
  modified_base 13: mod_base = OTHER; note = 2'-O-Methyl nucleotide
  modified_base 14: mod_base = OTHER; note = 2'-fluoro nucleotide
  modified_base 15: mod_base = OTHER; note = 2'-O-Methyl nucleotide
  modified_base 16: mod_base = OTHER; note = 2'-fluoro nucleotide
  modified_base 17: mod_base = OTHER; note = 2'-O-Methyl nucleotide
  modified_base 18: mod_base = OTHER; note = 2'-fluoro nucleotide
  modified_base 19: mod_base = OTHER; note = 2'-O-Methyl nucleotide
  modified_base 20: mod_base = OTHER; note = deoxy-thymine phosphorothioate
  misc_feature 1..19: note = RNA
  misc_feature 20..21: note = DNA
tgaacatcctctggaggcttt

SEQ ID NO: 1332 - DNA, 21 bp, synthetic construct
  misc_feature 1..21: note = Description of Artificial Sequence: Synthetic oligonucleotide
  source 1..21: mol_type = other DNA
  modified_base 1: mod_base = OTHER; note = 2'-O-Methyl nucleotide
  modified_base 2: mod_base = OTHER; note = 2'-O-Methyl nucleotide
  modified_base 3: mod_base = OTHER; note = 2'-fluoro nucleotide
  modified_base 4: mod_base = OTHER; note = 2'-O-Methyl nucleotide
  modified_base 5: mod_base = OTHER; note = 2'-fluoro nucleotide
  modified_base 6: mod_base = OTHER; note = 2'-O-Methyl nucleotide
  modified_base 7: mod_base = OTHER; note = 2'-fluoro nucleotide
  modified_base 8: mod_base = OTHER; note = 2'-O-Methyl nucleotide
  modified_base 9: mod_base = OTHER; note = 2'-fluoro nucleotide
  modified_base 10: mod_base = OTHER; note = 2'-O-Methyl nucleotide
  modified_base 11: mod_base = OTHER; note = 2'-fluoro nucleotide
  modified_base 12: mod_base = OTHER; note = 2'-O-Methyl nucleotide
  modified_base 13: mod_base = OTHER; note = 2'-fluoro nucleotide
  modified_base 14: mod_base = OTHER; note = 2'-O-Methyl nucleotide
  modified_base 15: mod_base = OTHER; note = 2'-fluoro nucleotide
  modified_base 16: mod_base = OTHER; note = 2'-O-Methyl nucleotide
  modified_base 17: mod_base = OTHER; note = 2'-fluoro nucleotide
  modified_base 18: mod_base = OTHER; note = 2'-O-Methyl nucleotide
  modified_base 19: mod_base = OTHER; note = 2'-fluoro nucleotide
  modified_base 20: mod_base = OTHER; note = deoxy-thymine phosphorothioate
  misc_feature 1..19: note = RNA
  misc_feature 20..21: note = DNA
cctccagaggatgttcaattt

SEQ ID NO: 1333 - DNA, 21 bp, synthetic construct
  misc_feature 1..21: note = Description of Artificial Sequence: Synthetic oligonucleotide
  source 1..21: mol_type = other DNA
  modified_base 1: mod_base = OTHER; note = 2'-fluoro nucleotide
  modified_base 2: mod_base = OTHER; note = 2'-fluoro nucleotide
  modified_base 3: mod_base = OTHER; note = 2'-O-Methyl nucleotide
  modified_base 4: mod_base = OTHER; note = 2'-fluoro nucleotide
  modified_base 5: mod_base = OTHER; note = 2'-O-Methyl nucleotide
  modified_base 6: mod_base = OTHER; note = 2'-fluoro nucleotide
  modified_base 7: mod_base = OTHER; note = 2'-O-Methyl nucleotide
  modified_base 8: mod_base = OTHER; note = 2'-fluoro nucleotide
  modified_base 9: mod_base = OTHER; note = 2'-O-Methyl nucleotide
  modified_base 10: mod_base = OTHER; note = 2'-fluoro nucleotide
  modified_base 11: mod_base = OTHER; note = 2'-O-Methyl nucleotide
  modified_base 12: mod_base = OTHER; note = 2'-fluoro nucleotide
  modified_base 13: mod_base = OTHER; note = 2'-O-Methyl nucleotide
  modified_base 14: mod_base = OTHER; note = 2'-fluoro nucleotide
  modified_base 15: mod_base = OTHER; note = 2'-O-Methyl nucleotide
  modified_base 16: mod_base = OTHER; note = 2'-fluoro nucleotide
  modified_base 17: mod_base = OTHER; note = 2'-O-Methyl nucleotide
  modified_base 18: mod_base = OTHER; note = 2'-fluoro nucleotide
  modified_base 19: mod_base = OTHER; note = 2'-O-Methyl nucleotide
  modified_base 20: mod_base = OTHER; note = deoxy-thymine phosphorothioate
  misc_feature 1..19: note = RNA
  misc_feature 20..21: note = DNA
attgaacatcctctggaggtt

SEQ ID NO: 1334 - DNA, 21 bp, synthetic construct
  misc_feature 1..21: note = Description of Artificial Sequence: Synthetic oligonucleotide
  source 1..21: mol_type = other DNA
  modified_base 1: mod_base = OTHER; note = 2'-O-Methyl nucleotide
  modified_base 2: mod_base = OTHER; note = 2'-O-Methyl nucleotide
  modified_base 3: mod_base = OTHER; note = 2'-fluoro nucleotide
  modified_base 4: mod_base = OTHER; note = 2'-O-Methyl nucleotide
  modified_base 5: mod_base = OTHER; note = 2'-fluoro nucleotide
  modified_base 6: mod_base = OTHER; note = 2'-O-Methyl nucleotide
  modified_base 7: mod_base = OTHER; note = 2'-fluoro nucleotide
  modified_base 8: mod_base = OTHER; note = 2'-O-Methyl nucleotide
  modified_base 9: mod_base = OTHER; note = 2'-fluoro nucleotide
  modified_base 10: mod_base = OTHER; note = 2'-O-Methyl nucleotide
  modified_base 11: mod_base = OTHER; note = 2'-fluoro nucleotide
  modified_base 12: mod_base = OTHER; note = 2'-O-Methyl nucleotide
  modified_base 13: mod_base = OTHER; note = 2'-fluoro nucleotide
  modified_base 14: mod_base = OTHER; note = 2'-O-Methyl nucleotide
  modified_base 15: mod_base = OTHER; note = 2'-fluoro nucleotide
  modified_base 16: mod_base = OTHER; note = 2'-O-Methyl nucleotide
  modified_base 17: mod_base = OTHER; note = 2'-fluoro nucleotide
  modified_base 18: mod_base = OTHER; note = 2'-O-Methyl nucleotide
  modified_base 19: mod_base = OTHER; note = 2'-fluoro nucleotide
  modified_base 20: mod_base = OTHER; note = deoxy-thymine phosphorothioate
  misc_feature 1..19: note = RNA
  misc_feature 20..21: note = DNA
ctccagaggatgttcaatatt

SEQ ID NO: 1335 - DNA, 21 bp, synthetic construct
  misc_feature 1..21: note = Description of Artificial Sequence: Synthetic oligonucleotide
  source 1..21: mol_type = other DNA
  modified_base 1: mod_base = OTHER; note = 2'-fluoro nucleotide
  modified_base 2: mod_base = OTHER; note = 2'-fluoro nucleotide
  modified_base 3: mod_base = OTHER; note = 2'-O-Methyl nucleotide
  modified_base 4: mod_base = OTHER; note = 2'-fluoro nucleotide
  modified_base 5: mod_base = OTHER; note = 2'-O-Methyl nucleotide
  modified_base 6: mod_base = OTHER; note = 2'-fluoro nucleotide
  modified_base 7: mod_base = OTHER; note = 2'-O-Methyl nucleotide
  modified_base 8: mod_base = OTHER; note = 2'-fluoro nucleotide
  modified_base 9: mod_base = OTHER; note = 2'-O-Methyl nucleotide
  modified_base 10: mod_base = OTHER; note = 2'-fluoro nucleotide
  modified_base 11: mod_base = OTHER; note = 2'-O-Methyl nucleotide
  modified_base 12: mod_base = OTHER; note = 2'-fluoro nucleotide
  modified_base 13: mod_base = OTHER; note = 2'-O-Methyl nucleotide
  modified_base 14: mod_base = OTHER; note = 2'-fluoro nucleotide
  modified_base 15: mod_base = OTHER; note = 2'-O-Methyl nucleotide
  modified_base 16: mod_base = OTHER; note = 2'-fluoro nucleotide
  modified_base 17: mod_base = OTHER; note = 2'-O-Methyl nucleotide
  modified_base 18: mod_base = OTHER; note = 2'-fluoro nucleotide
  modified_base 19: mod_base = OTHER; note = 2'-O-Methyl nucleotide
  modified_base 20: mod_base = OTHER; note = deoxy-thymine phosphorothioate
  misc_feature 1..19: note = RNA
  misc_feature 20..21: note = DNA
tattgaacatcctctggagtt

SEQ ID NO: 1336 - DNA, 21 bp, synthetic construct
  misc_feature 1..21: note = Description of Artificial Sequence: Synthetic oligonucleotide
  source 1..21: mol_type = other DNA
  modified_base 1: mod_base = OTHER; note = 2'-O-Methyl nucleotide
  modified_base 2: mod_base = OTHER; note = 2'-O-Methyl nucleotide
  modified_base 3: mod_base = OTHER; note = 2'-fluoro nucleotide
  modified_base 4: mod_base = OTHER; note = 2'-O-Methyl nucleotide
  modified_base 5: mod_base = OTHER; note = 2'-fluoro nucleotide
  modified_base 6: mod_base = OTHER; note = 2'-O-Methyl nucleotide
  modified_base 7: mod_base = OTHER; note = 2'-fluoro nucleotide
  modified_base 8: mod_base = OTHER; note = 2'-O-Methyl nucleotide
  modified_base 9: mod_base = OTHER; note = 2'-fluoro nucleotide
  modified_base 10: mod_base = OTHER; note = 2'-O-Methyl nucleotide
  modified_base 11: mod_base = OTHER; note = 2'-fluoro nucleotide
  modified_base 12: mod_base = OTHER; note = 2'-O-Methyl nucleotide
  modified_base 13: mod_base = OTHER; note = 2'-fluoro nucleotide
  modified_base 14: mod_base = OTHER; note = 2'-O-Methyl nucleotide
  modified_base 15: mod_base = OTHER; note = 2'-fluoro nucleotide
  modified_base 16: mod_base = OTHER; note = 2'-O-Methyl nucleotide
  modified_base 17: mod_base = OTHER; note = 2'-fluoro nucleotide
  modified_base 18: mod_base = OTHER; note = 2'-O-Methyl nucleotide
  modified_base 19: mod_base = OTHER; note = 2'-fluoro nucleotide
  modified_base 20: mod_base = OTHER; note = deoxy-thymine phosphorothioate
  misc_feature 1..19: note = RNA
  misc_feature 20..21: note = DNA
agaggatgttcaataactgtt

SEQ ID NO: 1337 - DNA, 21 bp, synthetic construct
  misc_feature 1..21: note = Description of Artificial Sequence: Synthetic oligonucleotide
  source 1..21: mol_type = other DNA
  modified_base 1: mod_base = OTHER; note = 2'-fluoro nucleotide
  modified_base 2: mod_base = OTHER; note = 2'-fluoro nucleotide
  modified_base 3: mod_base = OTHER; note = 2'-O-Methyl nucleotide
  modified_base 4: mod_base = OTHER; note = 2'-fluoro nucleotide
  modified_base 5: mod_base = OTHER; note = 2'-O-Methyl nucleotide
  modified_base 6: mod_base = OTHER; note = 2'-fluoro nucleotide
  modified_base 7: mod_base = OTHER; note = 2'-O-Methyl nucleotide
  modified_base 8: mod_base = OTHER; note = 2'-fluoro nucleotide
  modified_base 9: mod_base = OTHER; note = 2'-O-Methyl nucleotide
  modified_base 10: mod_base = OTHER; note = 2'-fluoro nucleotide
  modified_base 11: mod_base = OTHER; note = 2'-O-Methyl nucleotide
  modified_base 12: mod_base = OTHER; note = 2'-fluoro nucleotide
  modified_base 13: mod_base = OTHER; note = 2'-O-Methyl nucleotide
  modified_base 14: mod_base = OTHER; note = 2'-fluoro nucleotide
  modified_base 15: mod_base = OTHER; note = 2'-O-Methyl nucleotide
  modified_base 16: mod_base = OTHER; note = 2'-fluoro nucleotide
  modified_base 17: mod_base = OTHER; note = 2'-O-Methyl nucleotide
  modified_base 18: mod_base = OTHER; note = 2'-fluoro nucleotide
  modified_base 19: mod_base = OTHER; note = 2'-O-Methyl nucleotide
  modified_base 20: mod_base = OTHER; note = deoxy-thymine phosphorothioate
  misc_feature 1..19: note = RNA
  misc_feature 20..21: note = DNA
cagttattgaacatcctcttt

SEQ ID NO: 1338 - DNA, 21 bp, synthetic construct
  misc_feature 1..21: note = Description of Artificial Sequence: Synthetic oligonucleotide
  source 1..21: mol_type = other DNA
  modified_base 1: mod_base = OTHER; note = 2'-O-Methyl nucleotide
  modified_base 2: mod_base = OTHER; note = 2'-O-Methyl nucleotide
  modified_base 3: mod_base = OTHER; note = 2'-fluoro nucleotide
  modified_base 4: mod_base = OTHER; note = 2'-O-Methyl nucleotide
  modified_base 5: mod_base = OTHER; note = 2'-fluoro nucleotide
  modified_base 6: mod_base = OTHER; note = 2'-O-Methyl nucleotide
  modified_base 7: mod_base = OTHER; note = 2'-fluoro nucleotide
  modified_base 8: mod_base = OTHER; note = 2'-O-Methyl nucleotide
  modified_base 9: mod_base = OTHER; note = 2'-fluoro nucleotide
  modified_base 10: mod_base = OTHER; note = 2'-O-Methyl nucleotide
  modified_base 11: mod_base = OTHER; note = 2'-fluoro nucleotide
  modified_base 12: mod_base = OTHER; note = 2'-O-Methyl nucleotide
  modified_base 13: mod_base = OTHER; note = 2'-fluoro nucleotide
  modified_base 14: mod_base = OTHER; note = 2'-O-Methyl nucleotide
  modified_base 15: mod_base = OTHER; note = 2'-fluoro nucleotide
  modified_base 16: mod_base = OTHER; note = 2'-O-Methyl nucleotide
  modified_base 17: mod_base = OTHER; note = 2'-fluoro nucleotide
  modified_base 18: mod_base = OTHER; note = 2'-O-Methyl nucleotide
  modified_base 19: mod_base = OTHER; note = 2'-fluoro nucleotide
  modified_base 20: mod_base = OTHER; note = deoxy-thymine phosphorothioate
  misc_feature 1..19: note = RNA
  misc_feature 20..21: note = DNA
aggatgttcaataactgtgtt

SEQ ID NO: 1339 - DNA, 21 bp, synthetic construct
  misc_feature 1..21: note = Description of Artificial Sequence: Synthetic oligonucleotide
  source 1..21: mol_type = other DNA
  modified_base 1: mod_base = OTHER; note = 2'-fluoro nucleotide
  modified_base 2: mod_base = OTHER; note = 2'-fluoro nucleotide
  modified_base 3: mod_base = OTHER; note = 2'-O-Methyl nucleotide
  modified_base 4: mod_base = OTHER; note = 2'-fluoro nucleotide
  modified_base 5: mod_base = OTHER; note = 2'-O-Methyl nucleotide
  modified_base 6: mod_base = OTHER; note = 2'-fluoro nucleotide
  modified_base 7: mod_base = OTHER; note = 2'-O-Methyl nucleotide
  modified_base 8: mod_base = OTHER; note = 2'-fluoro nucleotide
  modified_base 9: mod_base = OTHER; note = 2'-O-Methyl nucleotide
  modified_base 10: mod_base = OTHER; note = 2'-fluoro nucleotide
  modified_base 11: mod_base = OTHER; note = 2'-O-Methyl nucleotide
  modified_base 12: mod_base = OTHER; note = 2'-fluoro nucleotide
  modified_base 13: mod_base = OTHER; note = 2'-O-Methyl nucleotide
  modified_base 14: mod_base = OTHER; note = 2'-fluoro nucleotide
  modified_base 15: mod_base = OTHER; note = 2'-O-Methyl nucleotide
  modified_base 16: mod_base = OTHER; note = 2'-fluoro nucleotide
  modified_base 17: mod_base = OTHER; note = 2'-O-Methyl nucleotide
  modified_base 18: mod_base = OTHER; note = 2'-fluoro nucleotide
  modified_base 19: mod_base = OTHER; note = 2'-O-Methyl nucleotide
  modified_base 20: mod_base = OTHER; note = deoxy-thymine phosphorothioate
  misc_feature 1..19: note = RNA
  misc_feature 20..21: note = DNA
cacagttattgaacatccttt

SEQ ID NO: 1340 - DNA, 21 bp, synthetic construct
  misc_feature 1..21: note = Description of Artificial Sequence: Synthetic oligonucleotide
  source 1..21: mol_type = other DNA
  modified_base 1: mod_base = OTHER; note = 2'-O-Methyl nucleotide
  modified_base 2: mod_base = OTHER; note = 2'-O-Methyl nucleotide
  modified_base 3: mod_base = OTHER; note = 2'-fluoro nucleotide
  modified_base 4: mod_base = OTHER; note = 2'-O-Methyl nucleotide
  modified_base 5: mod_base = OTHER; note = 2'-fluoro nucleotide
  modified_base 6: mod_base = OTHER; note = 2'-O-Methyl nucleotide
  modified_base 7: mod_base = OTHER; note = 2'-fluoro nucleotide
  modified_base 8: mod_base = OTHER; note = 2'-O-Methyl nucleotide
  modified_base 9: mod_base = OTHER; note = 2'-fluoro nucleotide
  modified_base 10: mod_base = OTHER; note = 2'-O-Methyl nucleotide
  modified_base 11: mod_base = OTHER; note = 2'-fluoro nucleotide
  modified_base 12: mod_base = OTHER; note = 2'-O-Methyl nucleotide
  modified_base 13: mod_base = OTHER; note = 2'-fluoro nucleotide
  modified_base 14: mod_base = OTHER; note = 2'-O-Methyl nucleotide
  modified_base 15: mod_base = OTHER; note = 2'-fluoro nucleotide
  modified_base 16: mod_base = OTHER; note = 2'-O-Methyl nucleotide
  modified_base 17: mod_base = OTHER; note = 2'-fluoro nucleotide
  modified_base 18: mod_base = OTHER; note = 2'-O-Methyl nucleotide
  modified_base 19: mod_base = OTHER; note = 2'-fluoro nucleotide
  modified_base 20: mod_base = OTHER; note = deoxy-thymine phosphorothioate
  misc_feature 1..19: note = RNA
  misc_feature 20..21: note = DNA
tgttcaataactgtgaggttt

SEQ ID NO: 1341 - DNA, 21 bp, synthetic construct
  misc_feature 1..21: note = Description of Artificial Sequence: Synthetic oligonucleotide
  source 1..21: mol_type = other DNA
  modified_base 1: mod_base = OTHER; note = 2'-fluoro nucleotide
  modified_base 2: mod_base = OTHER; note = 2'-fluoro nucleotide
  modified_base 3: mod_base = OTHER; note = 2'-O-Methyl nucleotide
  modified_base 4: mod_base = OTHER; note = 2'-fluoro nucleotide
  modified_base 5: mod_base = OTHER; note = 2'-O-Methyl nucleotide
  modified_base 6: mod_base = OTHER; note = 2'-fluoro nucleotide
  modified_base 7: mod_base = OTHER; note = 2'-O-Methyl nucleotide
  modified_base 8: mod_base = OTHER; note = 2'-fluoro nucleotide
  modified_base 9: mod_base = OTHER; note = 2'-O-Methyl nucleotide
  modified_base 10: mod_base = OTHER; note = 2'-fluoro nucleotide
  modified_base 11: mod_base = OTHER; note = 2'-O-Methyl nucleotide
  modified_base 12: mod_base = OTHER; note = 2'-fluoro nucleotide
  modified_base 13: mod_base = OTHER; note = 2'-O-Methyl nucleotide
  modified_base 14: mod_base = OTHER; note = 2'-fluoro nucleotide
  modified_base 15: mod_base = OTHER; note = 2'-O-Methyl nucleotide
  modified_base 16: mod_base = OTHER; note = 2'-fluoro nucleotide
  modified_base 17: mod_base = OTHER; note = 2'-O-Methyl nucleotide
  modified_base 18: mod_base = OTHER; note = 2'-fluoro nucleotide
  modified_base 19: mod_base = OTHER; note = 2'-O-Methyl nucleotide
  modified_base 20: mod_base = OTHER; note = deoxy-thymine phosphorothioate
  misc_feature 1..19: note = RNA
  misc_feature 20..21: note = DNA
acctcacagttattgaacatt

SEQ ID NO: 1342 - DNA, 21 bp, synthetic construct
  misc_feature 1..21: note = Description of Artificial Sequence: Synthetic oligonucleotide
  source 1..21: mol_type = other DNA
  modified_base 1: mod_base = OTHER; note = 2'-O-Methyl nucleotide
  modified_base 2: mod_base = OTHER; note = 2'-O-Methyl nucleotide
  modified_base 3: mod_base = OTHER; note = 2'-fluoro nucleotide
  modified_base 4: mod_base = OTHER; note = 2'-O-Methyl nucleotide
  modified_base 5: mod_base = OTHER; note = 2'-fluoro nucleotide
  modified_base 6: mod_base = OTHER; note = 2'-O-Methyl nucleotide
  modified_base 7: mod_base = OTHER; note = 2'-fluoro nucleotide
  modified_base 8: mod_base = OTHER; note = 2'-O-Methyl nucleotide
  modified_base 9: mod_base = OTHER; note = 2'-fluoro nucleotide
  modified_base 10: mod_base = OTHER; note = 2'-O-Methyl nucleotide
  modified_base 11: mod_base = OTHER; note = 2'-fluoro nucleotide
  modified_base 12: mod_base = OTHER; note = 2'-O-Methyl nucleotide
  modified_base 13: mod_base = OTHER; note = 2'-fluoro nucleotide
  modified_base 14: mod_base = OTHER; note = 2'-O-Methyl nucleotide
  modified_base 15: mod_base = OTHER; note = 2'-fluoro nucleotide
  modified_base 16: mod_base = OTHER; note = 2'-O-Methyl nucleotide
  modified_base 17: mod_base = OTHER; note = 2'-fluoro nucleotide
  modified_base 18: mod_base = OTHER; note = 2'-O-Methyl nucleotide
  modified_base 19: mod_base = OTHER; note = 2'-fluoro nucleotide
  modified_base 20: mod_base = OTHER; note = deoxy-thymine phosphorothioate
  misc_feature 1..19: note = RNA
  misc_feature 20..21: note = DNA
ttcaataactgtgaggtggtt

SEQ ID NO: 1343 - DNA, 21 bp, synthetic construct
  misc_feature 1..21: note = Description of Artificial Sequence: Synthetic oligonucleotide
  source 1..21: mol_type = other DNA
  modified_base 1: mod_base = OTHER; note = 2'-fluoro nucleotide
  modified_base 2: mod_base = OTHER; note = 2'-fluoro nucleotide
  modified_base 3: mod_base = OTHER; note = 2'-O-Methyl nucleotide
  modified_base 4: mod_base = OTHER; note = 2'-fluoro nucleotide
  modified_base 5: mod_base = OTHER; note = 2'-O-Methyl nucleotide
  modified_base 6: mod_base = OTHER; note = 2'-fluoro nucleotide
  modified_base 7: mod_base = OTHER; note = 2'-O-Methyl nucleotide
  modified_base 8: mod_base = OTHER; note = 2'-fluoro nucleotide
  modified_base 9: mod_base = OTHER; note = 2'-O-Methyl nucleotide
  modified_base 10: mod_base = OTHER; note = 2'-fluoro nucleotide
  modified_base 11: mod_base = OTHER; note = 2'-O-Methyl nucleotide
  modified_base 12: mod_base = OTHER; note = 2'-fluoro nucleotide
  modified_base 13: mod_base = OTHER; note = 2'-O-Methyl nucleotide
  modified_base 14: mod_base = OTHER; note = 2'-fluoro nucleotide
  modified_base 15: mod_base = OTHER; note = 2'-O-Methyl nucleotide
  modified_base 16: mod_base = OTHER; note = 2'-fluoro nucleotide
  modified_base 17: mod_base = OTHER; note = 2'-O-Methyl nucleotide
  modified_base 18: mod_base = OTHER; note = 2'-fluoro nucleotide
  modified_base 19: mod_base = OTHER; note = 2'-O-Methyl nucleotide
  modified_base 20: mod_base = OTHER; note = deoxy-thymine phosphorothioate
  misc_feature 1..19: note = RNA
  misc_feature 20..21: note = DNA
ccacctcacagttattgaatt

SEQ ID NO: 1344 - DNA, 21 bp, synthetic construct
  misc_feature 1..21: note = Description of Artificial Sequence: Synthetic oligonucleotide
  source 1..21: mol_type = other DNA
  modified_base 1: mod_base = OTHER; note = 2'-O-Methyl nucleotide
  modified_base 2: mod_base = OTHER; note = 2'-O-Methyl nucleotide
  modified_base 3: mod_base = OTHER; note = 2'-fluoro nucleotide
  modified_base 4: mod_base = OTHER; note = 2'-O-Methyl nucleotide
  modified_base 5: mod_base = OTHER; note = 2'-fluoro nucleotide
  modified_base 6: mod_base = OTHER; note = 2'-O-Methyl nucleotide
  modified_base 7: mod_base = OTHER; note = 2'-fluoro nucleotide
  modified_base 8: mod_base = OTHER; note = 2'-O-Methyl nucleotide
  modified_base 9: mod_base = OTHER; note = 2'-fluoro nucleotide
  modified_base 10: mod_base = OTHER; note = 2'-O-Methyl nucleotide
  modified_base 11: mod_base = OTHER; note = 2'-fluoro nucleotide
  modified_base 12: mod_base = OTHER; note = 2'-O-Methyl nucleotide
  modified_base 13: mod_base = OTHER; note = 2'-fluoro nucleotide
  modified_base 14: mod_base = OTHER; note = 2'-O-Methyl nucleotide
  modified_base 15: mod_base = OTHER; note = 2'-fluoro nucleotide
  modified_base 16: mod_base = OTHER; note = 2'-O-Methyl nucleotide
  modified_base 17: mod_base = OTHER; note = 2'-fluoro nucleotide
  modified_base 18: mod_base = OTHER; note = 2'-O-Methyl nucleotide
  modified_base 19: mod_base = OTHER; note = 2'-fluoro nucleotide
  modified_base 20: mod_base = OTHER; note = deoxy-thymine phosphorothioate
  misc_feature 1..19: note = RNA
  misc_feature 20..21: note = DNA
tcaataactgtgaggtggttt

SEQ ID NO: 1345 - DNA, 21 bp, synthetic construct
  misc_feature 1..21: note = Description of Artificial Sequence: Synthetic oligonucleotide
  source 1..21: mol_type = other DNA
  modified_base 1: mod_base = OTHER; note = 2'-fluoro nucleotide
  modified_base 2: mod_base = OTHER; note = 2'-fluoro nucleotide
  modified_base 3: mod_base = OTHER; note = 2'-O-Methyl nucleotide
  modified_base 4: mod_base = OTHER; note = 2'-fluoro nucleotide
  modified_base 5: mod_base = OTHER; note = 2'-O-Methyl nucleotide
  modified_base 6: mod_base = OTHER; note = 2'-fluoro nucleotide
  modified_base 7: mod_base = OTHER; note = 2'-O-Methyl nucleotide
  modified_base 8: mod_base = OTHER; note = 2'-fluoro nucleotide
  modified_base 9: mod_base = OTHER; note = 2'-O-Methyl nucleotide
  modified_base 10: mod_base = OTHER; note = 2'-fluoro nucleotide
  modified_base 11: mod_base = OTHER; note = 2'-O-Methyl nucleotide
  modified_base 12: mod_base = OTHER; note = 2'-fluoro nucleotide
  modified_base 13: mod_base = OTHER; note = 2'-O-Methyl nucleotide
  modified_base 14: mod_base = OTHER; note = 2'-fluoro nucleotide
  modified_base 15: mod_base = OTHER; note = 2'-O-Methyl nucleotide
  modified_base 16: mod_base = OTHER; note = 2'-fluoro nucleotide
  modified_base 17: mod_base = OTHER; note = 2'-O-Methyl nucleotide
  modified_base 18: mod_base = OTHER; note = 2'-fluoro nucleotide
  modified_base 19: mod_base = OTHER; note = 2'-O-Methyl nucleotide
  modified_base 20: mod_base = OTHER; note = deoxy-thymine phosphorothioate
  misc_feature 1..19: note = RNA
  misc_feature 20..21: note = DNA
accacctcacagttattgatt

SEQ ID NO: 1346 - DNA, 21 bp, synthetic construct
  misc_feature 1..21: note = Description of Artificial Sequence: Synthetic oligonucleotide
  source 1..21: mol_type = other DNA
  modified_base 1: mod_base = OTHER; note = 2'-O-Methyl nucleotide
  modified_base 2: mod_base = OTHER; note = 2'-O-Methyl nucleotide
  modified_base 3: mod_base = OTHER; note = 2'-fluoro nucleotide
  modified_base 4: mod_base = OTHER; note = 2'-O-Methyl nucleotide
  modified_base 5: mod_base = OTHER; note = 2'-fluoro nucleotide
  modified_base 6: mod_base = OTHER; note = 2'-O-Methyl nucleotide
  modified_base 7: mod_base = OTHER; note = 2'-fluoro nucleotide
  modified_base 8: mod_base = OTHER; note = 2'-O-Methyl nucleotide
  modified_base 9: mod_base = OTHER; note = 2'-fluoro nucleotide
  modified_base 10: mod_base = OTHER; note = 2'-O-Methyl nucleotide
  modified_base 11: mod_base = OTHER; note = 2'-fluoro nucleotide
  modified_base 12: mod_base = OTHER; note = 2'-O-Methyl nucleotide
  modified_base 13: mod_base = OTHER; note = 2'-fluoro nucleotide
  modified_base 14: mod_base = OTHER; note = 2'-O-Methyl nucleotide
  modified_base 15: mod_base = OTHER; note = 2'-fluoro nucleotide
  modified_base 16: mod_base = OTHER; note = 2'-O-Methyl nucleotide
  modified_base 17: mod_base = OTHER; note = 2'-fluoro nucleotide
  modified_base 18: mod_base = OTHER; note = 2'-O-Methyl nucleotide
  modified_base 19: mod_base = OTHER; note = 2'-fluoro nucleotide
  modified_base 20: mod_base = OTHER; note = deoxy-thymine phosphorothioate
  misc_feature 1..19: note = RNA
  misc_feature 20..21: note = DNA
caataactgtgaggtggtctt

SEQ ID NO: 1347 - DNA, 21 bp, synthetic construct
  misc_feature 1..21: note = Description of Artificial Sequence: Synthetic oligonucleotide
  source 1..21: mol_type = other DNA
  modified_base 1: mod_base = OTHER; note = 2'-fluoro nucleotide
  modified_base 2: mod_base = OTHER; note = 2'-fluoro nucleotide
  modified_base 3: mod_base = OTHER; note = 2'-O-Methyl nucleotide
  modified_base 4: mod_base = OTHER; note = 2'-fluoro nucleotide
  modified_base 5: mod_base = OTHER; note = 2'-O-Methyl nucleotide
  modified_base 6: mod_base = OTHER; note = 2'-fluoro nucleotide
  modified_base 7: mod_base = OTHER; note = 2'-O-Methyl nucleotide
  modified_base 8: mod_base = OTHER; note = 2'-fluoro nucleotide
  modified_base 9: mod_base = OTHER; note = 2'-O-Methyl nucleotide
  modified_base 10: mod_base = OTHER; note = 2'-fluoro nucleotide
  modified_base 11: mod_base = OTHER; note = 2'-O-Methyl nucleotide
  modified_base 12: mod_base = OTHER; note = 2'-fluoro nucleotide
  modified_base 13: mod_base = OTHER; note = 2'-O-Methyl nucleotide
  modified_base 14: mod_base = OTHER; note = 2'-fluoro nucleotide
  modified_base 15: mod_base = OTHER; note = 2'-O-Methyl nucleotide
  modified_base 16: mod_base = OTHER; note = 2'-fluoro nucleotide
  modified_base 17: mod_base = OTHER; note = 2'-O-Methyl nucleotide
  modified_base 18: mod_base = OTHER; note = 2'-fluoro nucleotide
  modified_base 19: mod_base = OTHER; note = 2'-O-Methyl nucleotide
  modified_base 20: mod_base = OTHER; note = deoxy-thymine phosphorothioate
  misc_feature 1..19: note = RNA
  misc_feature 20..21: note = DNA
gaccacctcacagttattgtt

SEQ ID NO: 1348 - DNA, 21 bp, synthetic construct
  misc_feature 1..21: note = Description of Artificial Sequence: Synthetic oligonucleotide
  source 1..21: mol_type = other DNA
  modified_base 1: mod_base = OTHER; note = 2'-O-Methyl nucleotide
  modified_base 2: mod_base = OTHER; note = 2'-O-Methyl nucleotide
  modified_base 3: mod_base = OTHER; note = 2'-fluoro nucleotide
  modified_base 4: mod_base = OTHER; note = 2'-O-Methyl nucleotide
  modified_base 5: mod_base = OTHER; note = 2'-fluoro nucleotide
  modified_base 6: mod_base = OTHER; note = 2'-O-Methyl nucleotide
  modified_base 7: mod_base = OTHER; note = 2'-fluoro nucleotide
  modified_base 8: mod_base = OTHER; note = 2'-O-Methyl nucleotide
  modified_base 9: mod_base = OTHER; note = 2'-fluoro nucleotide
  modified_base 10: mod_base = OTHER; note = 2'-O-Methyl nucleotide
  modified_base 11: mod_base = OTHER; note = 2'-fluoro nucleotide
  modified_base 12: mod_base = OTHER; note = 2'-O-Methyl nucleotide
  modified_base 13: mod_base = OTHER; note = 2'-fluoro nucleotide
  modified_base 14: mod_base = OTHER; note = 2'-O-Methyl nucleotide
  modified_base 15: mod_base = OTHER; note = 2'-fluoro nucleotide
  modified_base 16: mod_base = OTHER; note = 2'-O-Methyl nucleotide
  modified_base 17: mod_base = OTHER; note = 2'-fluoro nucleotide
  modified_base 18: mod_base = OTHER; note = 2'-O-Methyl nucleotide
  modified_base 19: mod_base = OTHER; note = 2'-fluoro nucleotide
  modified_base 20: mod_base = OTHER; note = deoxy-thymine phosphorothioate
  misc_feature 1..19: note = RNA
  misc_feature 20..21: note = DNA
aataactgtgaggtggtcctt

SEQ ID NO: 1349 - DNA, 21 bp, synthetic construct
  misc_feature 1..21: note = Description of Artificial Sequence: Synthetic oligonucleotide
  source 1..21: mol_type = other DNA
  modified_base 1: mod_base = OTHER; note = 2'-fluoro nucleotide
  modified_base 2: mod_base = OTHER; note = 2'-fluoro nucleotide
  modified_base 3: mod_base = OTHER; note = 2'-O-Methyl nucleotide
  modified_base 4: mod_base = OTHER; note = 2'-fluoro nucleotide
  modified_base 5: mod_base = OTHER; note = 2'-O-Methyl nucleotide
  modified_base 6: mod_base = OTHER; note = 2'-fluoro nucleotide
  modified_base 7: mod_base = OTHER; note = 2'-O-Methyl nucleotide
  modified_base 8: mod_base = OTHER; note = 2'-fluoro nucleotide
  modified_base 9: mod_base = OTHER; note = 2'-O-Methyl nucleotide
  modified_base 10: mod_base = OTHER; note = 2'-fluoro nucleotide
  modified_base 11: mod_base = OTHER; note = 2'-O-Methyl nucleotide
  modified_base 12: mod_base = OTHER; note = 2'-fluoro nucleotide
  modified_base 13: mod_base = OTHER; note = 2'-O-Methyl nucleotide
  modified_base 14: mod_base = OTHER; note = 2'-fluoro nucleotide
  modified_base 15: mod_base = OTHER; note = 2'-O-Methyl nucleotide
  modified_base 16: mod_base = OTHER; note = 2'-fluoro nucleotide
  modified_base 17: mod_base = OTHER; note = 2'-O-Methyl nucleotide
  modified_base 18: mod_base = OTHER; note = 2'-fluoro nucleotide
  modified_base 19: mod_base = OTHER; note = 2'-O-Methyl nucleotide
  modified_base 20: mod_base = OTHER; note = deoxy-thymine phosphorothioate
  misc_feature 1..19: note = RNA
  misc_feature 20..21: note = DNA
ggaccacctcacagttatttt

SEQ ID NO: 1350 - DNA, 21 bp, synthetic construct
  misc_feature 1..21: note = Description of Artificial Sequence: Synthetic oligonucleotide
  source 1..21: mol_type = other DNA
  modified_base 1: mod_base = OTHER; note = 2'-O-Methyl nucleotide
  modified_base 2: mod_base = OTHER; note = 2'-O-Methyl nucleotide
  modified_base 3: mod_base = OTHER; note = 2'-fluoro nucleotide
  modified_base 4: mod_base = OTHER; note = 2'-O-Methyl nucleotide
  modified_base 5: mod_base = OTHER; note = 2'-fluoro nucleotide
  modified_base 6: mod_base = OTHER; note = 2'-O-Methyl nucleotide
  modified_base 7: mod_base = OTHER; note = 2'-fluoro nucleotide
  modified_base 8: mod_base = OTHER; note = 2'-O-Methyl nucleotide
  modified_base 9: mod_base = OTHER; note = 2'-fluoro nucleotide
  modified_base 10: mod_base = OTHER; note = 2'-O-Methyl nucleotide
  modified_base 11: mod_base = OTHER; note = 2'-fluoro nucleotide
  modified_base 12: mod_base = OTHER; note = 2'-O-Methyl nucleotide
  modified_base 13: mod_base = OTHER; note = 2'-fluoro nucleotide
  modified_base 14: mod_base = OTHER; note = 2'-O-Methyl nucleotide
  modified_base 15: mod_base = OTHER; note = 2'-fluoro nucleotide
  modified_base 16: mod_base = OTHER; note = 2'-O-Methyl nucleotide
  modified_base 17: mod_base = OTHER; note = 2'-fluoro nucleotide
  modified_base 18: mod_base = OTHER; note = 2'-O-Methyl nucleotide
  modified_base 19: mod_base = OTHER; note = 2'-fluoro nucleotide
  modified_base 20: mod_base = OTHER; note = deoxy-thymine phosphorothioate
  misc_feature 1..19: note = RNA
  misc_feature 20..21: note = DNA
ataactgtgaggtggtccttt

SEQ ID NO: 1351 - DNA, 21 bp, synthetic construct
  misc_feature 1..21: note = Description of Artificial Sequence: Synthetic oligonucleotide
  source 1..21: mol_type = other DNA
  modified_base 1: mod_base = OTHER; note = 2'-fluoro nucleotide
  modified_base 2: mod_base = OTHER; note = 2'-fluoro nucleotide
  modified_base 3: mod_base = OTHER; note = 2'-O-Methyl nucleotide
  modified_base 4: mod_base = OTHER; note = 2'-fluoro nucleotide
  modified_base 5: mod_base = OTHER; note = 2'-O-Methyl nucleotide
  modified_base 6: mod_base = OTHER; note = 2'-fluoro nucleotide
  modified_base 7: mod_base = OTHER; note = 2'-O-Methyl nucleotide
  modified_base 8: mod_base = OTHER; note = 2'-fluoro nucleotide
  modified_base 9: mod_base = OTHER; note = 2'-O-Methyl nucleotide
  modified_base 10: mod_base = OTHER; note = 2'-fluoro nucleotide
  modified_base 11: mod_base = OTHER; note = 2'-O-Methyl nucleotide
  modified_base 12: mod_base = OTHER; note = 2'-fluoro nucleotide
  modified_base 13: mod_base = OTHER; note = 2'-O-Methyl nucleotide
  modified_base 14: mod_base = OTHER; note = 2'-fluoro nucleotide
  modified_base 15: mod_base = OTHER; note = 2'-O-Methyl nucleotide
  modified_base 16: mod_base = OTHER; note = 2'-fluoro nucleotide
  modified_base 17: mod_base = OTHER; note = 2'-O-Methyl nucleotide
  modified_base 18: mod_base = OTHER; note = 2'-fluoro nucleotide
  modified_base 19: mod_base = OTHER; note = 2'-O-Methyl nucleotide
  modified_base 20: mod_base = OTHER; note = deoxy-thymine phosphorothioate
  misc_feature 1..19: note = RNA
  misc_feature 20..21: note = DNA
aggaccacctcacagttattt

SEQ ID NO: 1352 - DNA, 21 bp, synthetic construct
  misc_feature 1..21: note = Description of Artificial Sequence: Synthetic oligonucleotide
  source 1..21: mol_type = other DNA
  modified_base 1: mod_base = OTHER; note = 2'-O-Methyl nucleotide
  modified_base 2: mod_base = OTHER; note = 2'-O-Methyl nucleotide
  modified_base 3: mod_base = OTHER; note = 2'-fluoro nucleotide
  modified_base 4: mod_base = OTHER; note = 2'-O-Methyl nucleotide
  modified_base 5: mod_base = OTHER; note = 2'-fluoro nucleotide
  modified_base 6: mod_base = OTHER; note = 2'-O-Methyl nucleotide
  modified_base 7: mod_base = OTHER; note = 2'-fluoro nucleotide
  modified_base 8: mod_base = OTHER; note = 2'-O-Methyl nucleotide
  modified_base 9: mod_base = OTHER; note = 2'-fluoro nucleotide
  modified_base 10: mod_base = OTHER; note = 2'-O-Methyl nucleotide
  modified_base 11: mod_base = OTHER; note = 2'-fluoro nucleotide
  modified_base 12: mod_base = OTHER; note = 2'-O-Methyl nucleotide
  modified_base 13: mod_base = OTHER; note = 2'-fluoro nucleotide
  modified_base 14: mod_base = OTHER; note = 2'-O-Methyl nucleotide
  modified_base 15: mod_base = OTHER; note = 2'-fluoro nucleotide
  modified_base 16: mod_base = OTHER; note = 2'-O-Methyl nucleotide
  modified_base 17: mod_base = OTHER; note = 2'-fluoro nucleotide
  modified_base 18: mod_base = OTHER; note = 2'-O-Methyl nucleotide
  modified_base 19: mod_base = OTHER; note = 2'-fluoro nucleotide
  modified_base 20: mod_base = OTHER; note = deoxy-thymine phosphorothioate
  misc_feature 1..19: note = RNA
  misc_feature 20..21: note = DNA
taactgtgaggtggtcctttt

SEQ ID NO: 1353 - DNA, 21 bp, synthetic construct
  misc_feature 1..21: note = Description of Artificial Sequence: Synthetic oligonucleotide
  source 1..21: mol_type = other DNA
  modified_base 1: mod_base = OTHER; note = 2'-fluoro nucleotide
  modified_base 2: mod_base = OTHER; note = 2'-fluoro nucleotide
  modified_base 3: mod_base = OTHER; note = 2'-O-Methyl nucleotide
  modified_base 4: mod_base = OTHER; note = 2'-fluoro nucleotide
  modified_base 5: mod_base = OTHER; note = 2'-O-Methyl nucleotide
  modified_base 6: mod_base = OTHER; note = 2'-fluoro nucleotide
  modified_base 7: mod_base = OTHER; note = 2'-O-Methyl nucleotide
  modified_base 8: mod_base = OTHER; note = 2'-fluoro nucleotide
  modified_base 9: mod_base = OTHER; note = 2'-O-Methyl nucleotide
  modified_base 10: mod_base = OTHER; note = 2'-fluoro nucleotide
  modified_base 11: mod_base = OTHER; note = 2'-O-Methyl nucleotide
  modified_base 12: mod_base = OTHER; note = 2'-fluoro nucleotide
  modified_base 13: mod_base = OTHER; note = 2'-O-Methyl nucleotide
  modified_base 14: mod_base = OTHER; note = 2'-fluoro nucleotide
  modified_base 15: mod_base = OTHER; note = 2'-O-Methyl nucleotide
  modified_base 16: mod_base = OTHER; note = 2'-fluoro nucleotide
  modified_base 17: mod_base = OTHER; note = 2'-O-Methyl nucleotide
  modified_base 18: mod_base = OTHER; note = 2'-fluoro nucleotide
  modified_base 19: mod_base = OTHER; note = 2'-O-Methyl nucleotide
  modified_base 20: mod_base = OTHER; note = deoxy-thymine phosphorothioate
  misc_feature 1..19: note = RNA
  misc_feature 20..21: note = DNA
aaggaccacctcacagttatt

SEQ ID NO: 1354 - DNA, 21 bp, synthetic construct
  misc_feature 1..21: note = Description of Artificial Sequence: Synthetic oligonucleotide
  source 1..21: mol_type = other DNA
  modified_base 1: mod_base = OTHER; note = 2'-O-Methyl nucleotide
  modified_base 2: mod_base = OTHER; note = 2'-O-Methyl nucleotide
  modified_base 3: mod_base = OTHER; note = 2'-fluoro nucleotide
  modified_base 4: mod_base = OTHER; note = 2'-O-Methyl nucleotide
  modified_base 5: mod_base = OTHER; note = 2'-fluoro nucleotide
  modified_base 6: mod_base = OTHER; note = 2'-O-Methyl nucleotide
  modified_base 7: mod_base = OTHER; note = 2'-fluoro nucleotide
  modified_base 8: mod_base = OTHER; note = 2'-O-Methyl nucleotide
  modified_base 9: mod_base = OTHER; note = 2'-fluoro nucleotide
  modified_base 10: mod_base = OTHER; note = 2'-O-Methyl nucleotide
  modified_base 11: mod_base = OTHER; note = 2'-fluoro nucleotide
  modified_base 12: mod_base = OTHER; note = 2'-O-Methyl nucleotide
  modified_base 13: mod_base = OTHER; note = 2'-fluoro nucleotide
  modified_base 14: mod_base = OTHER; note = 2'-O-Methyl nucleotide
  modified_base 15: mod_base = OTHER; note = 2'-fluoro nucleotide
  modified_base 16: mod_base = OTHER; note = 2'-O-Methyl nucleotide
  modified_base 17: mod_base = OTHER; note = 2'-fluoro nucleotide
  modified_base 18: mod_base = OTHER; note = 2'-O-Methyl nucleotide
  modified_base 19: mod_base = OTHER; note = 2'-fluoro nucleotide
  modified_base 20: mod_base = OTHER; note = deoxy-thymine phosphorothioate
  misc_feature 1..19: note = RNA
  misc_feature 20..21: note = DNA
actgtgaggtggtccttggtt

SEQ ID NO: 1355 - DNA, 21 bp, synthetic construct
  misc_feature 1..21: note = Description of Artificial Sequence: Synthetic oligonucleotide
  source 1..21: mol_type = other DNA
  modified_base 1: mod_base = OTHER; note = 2'-fluoro nucleotide
  modified_base 2: mod_base = OTHER; note = 2'-fluoro nucleotide
  modified_base 3: mod_base = OTHER; note = 2'-O-Methyl nucleotide
  modified_base 4: mod_base = OTHER; note = 2'-fluoro nucleotide
  modified_base 5: mod_base = OTHER; note = 2'-O-Methyl nucleotide
  modified_base 6: mod_base = OTHER; note = 2'-fluoro nucleotide
  modified_base 7: mod_base = OTHER; note = 2'-O-Methyl nucleotide
  modified_base 8: mod_base = OTHER; note = 2'-fluoro nucleotide
  modified_base 9: mod_base = OTHER; note = 2'-O-Methyl nucleotide
  modified_base 10: mod_base = OTHER; note = 2'-fluoro nucleotide
  modified_base 11: mod_base = OTHER; note = 2'-O-Methyl nucleotide
  modified_base 12: mod_base = OTHER; note = 2'-fluoro nucleotide
  modified_base 13: mod_base = OTHER; note = 2'-O-Methyl nucleotide
  modified_base 14: mod_base = OTHER; note = 2'-fluoro nucleotide
  modified_base 15: mod_base = OTHER; note = 2'-O-Methyl nucleotide
  modified_base 16: mod_base = OTHER; note = 2'-fluoro nucleotide
  modified_base 17: mod_base = OTHER; note = 2'-O-Methyl nucleotide
  modified_base 18: mod_base = OTHER; note = 2'-fluoro nucleotide
  modified_base 19: mod_base = OTHER; note = 2'-O-Methyl nucleotide
  modified_base 20: mod_base = OTHER; note = deoxy-thymine phosphorothioate
  misc_feature 1..19: note = RNA
  misc_feature 20..21: note = DNA
ccaaggaccacctcacagttt

SEQ ID NO: 1356 - DNA, 21 bp, synthetic construct
  misc_feature 1..21: note = Description of Artificial Sequence: Synthetic oligonucleotide
  source 1..21: mol_type = other DNA
  modified_base 1: mod_base = OTHER; note = 2'-O-Methyl nucleotide
  modified_base 2: mod_base = OTHER; note = 2'-O-Methyl nucleotide
  modified_base 3: mod_base = OTHER; note = 2'-fluoro nucleotide
  modified_base 4: mod_base = OTHER; note = 2'-O-Methyl nucleotide
  modified_base 5: mod_base = OTHER; note = 2'-fluoro nucleotide
  modified_base 6: mod_base = OTHER; note = 2'-O-Methyl nucleotide
  modified_base 7: mod_base = OTHER; note = 2'-fluoro nucleotide
  modified_base 8: mod_base = OTHER; note = 2'-O-Methyl nucleotide
  modified_base 9: mod_base = OTHER; note = 2'-fluoro nucleotide
  modified_base 10: mod_base = OTHER; note = 2'-O-Methyl nucleotide
  modified_base 11: mod_base = OTHER; note = 2'-fluoro nucleotide
  modified_base 12: mod_base = OTHER; note = 2'-O-Methyl nucleotide
  modified_base 13: mod_base = OTHER; note = 2'-fluoro nucleotide
  modified_base 14: mod_base = OTHER; note = 2'-O-Methyl nucleotide
  modified_base 15: mod_base = OTHER; note = 2'-fluoro nucleotide
  modified_base 16: mod_base = OTHER; note = 2'-O-Methyl nucleotide
  modified_base 17: mod_base = OTHER; note = 2'-fluoro nucleotide
  modified_base 18: mod_base = OTHER; note = 2'-O-Methyl nucleotide
  modified_base 19: mod_base = OTHER; note = 2'-fluoro nucleotide
  modified_base 20: mod_base = OTHER; note = deoxy-thymine phosphorothioate
  misc_feature 1..19: note = RNA
  misc_feature 20..21: note = DNA
tgtgaggtggtccttgggatt

SEQ ID NO: 1357 - DNA, 21 bp, synthetic construct
  misc_feature 1..21: note = Description of Artificial Sequence: Synthetic oligonucleotide
  source 1..21: mol_type = other DNA
  modified_base 1: mod_base = OTHER; note = 2'-fluoro nucleotide
  modified_base 2: mod_base = OTHER; note = 2'-fluoro nucleotide
  modified_base 3: mod_base = OTHER; note = 2'-O-Methyl nucleotide
  modified_base 4: mod_base = OTHER; note = 2'-fluoro nucleotide
  modified_base 5: mod_base = OTHER; note = 2'-O-Methyl nucleotide
  modified_base 6: mod_base = OTHER; note = 2'-fluoro nucleotide
  modified_base 7: mod_base = OTHER; note = 2'-O-Methyl nucleotide
  modified_base 8: mod_base = OTHER; note = 2'-fluoro nucleotide
  modified_base 9: mod_base = OTHER; note = 2'-O-Methyl nucleotide
  modified_base 10: mod_base = OTHER; note = 2'-fluoro nucleotide
  modified_base 11: mod_base = OTHER; note = 2'-O-Methyl nucleotide
  modified_base 12: mod_base = OTHER; note = 2'-fluoro nucleotide
  modified_base 13: mod_base = OTHER; note = 2'-O-Methyl nucleotide
  modified_base 14: mod_base = OTHER; note = 2'-fluoro nucleotide
  modified_base 15: mod_base = OTHER; note = 2'-O-Methyl nucleotide
  modified_base 16: mod_base = OTHER; note = 2'-fluoro nucleotide
  modified_base 17: mod_base = OTHER; note = 2'-O-Methyl nucleotide
  modified_base 18: mod_base = OTHER; note = 2'-fluoro nucleotide
  modified_base 19: mod_base = OTHER; note = 2'-O-Methyl nucleotide
  modified_base 20: mod_base = OTHER; note = deoxy-thymine phosphorothioate
  misc_feature 1..19: note = RNA
  misc_feature 20..21: note = DNA
tcccaaggaccacctcacatt

SEQ ID NO: 1358 - DNA, 21 bp, synthetic construct
  misc_feature 1..21: note = Description of Artificial Sequence: Synthetic oligonucleotide
  source 1..21: mol_type = other DNA
  modified_base 1: mod_base = OTHER; note = 2'-O-Methyl nucleotide
  modified_base 2: mod_base = OTHER; note = 2'-O-Methyl nucleotide
  modified_base 3: mod_base = OTHER; note = 2'-fluoro nucleotide
  modified_base 4: mod_base = OTHER; note = 2'-O-Methyl nucleotide
  modified_base 5: mod_base = OTHER; note = 2'-fluoro nucleotide
  modified_base 6: mod_base = OTHER; note = 2'-O-Methyl nucleotide
  modified_base 7: mod_base = OTHER; note = 2'-fluoro nucleotide
  modified_base 8: mod_base = OTHER; note = 2'-O-Methyl nucleotide
  modified_base 9: mod_base = OTHER; note = 2'-fluoro nucleotide
  modified_base 10: mod_base = OTHER; note = 2'-O-Methyl nucleotide
  modified_base 11: mod_base = OTHER; note = 2'-fluoro nucleotide
  modified_base 12: mod_base = OTHER; note = 2'-O-Methyl nucleotide
  modified_base 13: mod_base = OTHER; note = 2'-fluoro nucleotide
  modified_base 14: mod_base = OTHER; note = 2'-O-Methyl nucleotide
  modified_base 15: mod_base = OTHER; note = 2'-fluoro nucleotide
  modified_base 16: mod_base = OTHER; note = 2'-O-Methyl nucleotide
  modified_base 17: mod_base = OTHER; note = 2'-fluoro nucleotide
  modified_base 18: mod_base = OTHER; note = 2'-O-Methyl nucleotide
  modified_base 19: mod_base = OTHER; note = 2'-fluoro nucleotide
  modified_base 20: mod_base = OTHER; note = deoxy-thymine phosphorothioate
  misc_feature 1..19: note = RNA
  misc_feature 20..21: note = DNA
gtgaggtggtccttgggaatt

SEQ ID NO: 1359 - DNA, 21 bp, synthetic construct
  misc_feature 1..21: note = Description of Artificial Sequence: Synthetic oligonucleotide
  source 1..21: mol_type = other DNA
  modified_base 1: mod_base = OTHER; note = 2'-fluoro nucleotide
  modified_base 2: mod_base = OTHER; note = 2'-fluoro nucleotide
  modified_base 3: mod_base = OTHER; note = 2'-O-Methyl nucleotide
  modified_base 4: mod_base = OTHER; note = 2'-fluoro nucleotide
  modified_base 5: mod_base = OTHER; note = 2'-O-Methyl nucleotide
  modified_base 6: mod_base = OTHER; note = 2'-fluoro nucleotide
  modified_base 7: mod_base = OTHER; note = 2'-O-Methyl nucleotide
  modified_base 8: mod_base = OTHER; note = 2'-fluoro nucleotide
  modified_base 9: mod_base = OTHER; note = 2'-O-Methyl nucleotide
  modified_base 10: mod_base = OTHER; note = 2'-fluoro nucleotide
  modified_base 11: mod_base = OTHER; note = 2'-O-Methyl nucleotide
  modified_base 12: mod_base = OTHER; note = 2'-fluoro nucleotide
  modified_base 13: mod_base = OTHER; note = 2'-O-Methyl nucleotide
  modified_base 14: mod_base = OTHER; note = 2'-fluoro nucleotide
  modified_base 15: mod_base = OTHER; note = 2'-O-Methyl nucleotide
  modified_base 16: mod_base = OTHER; note = 2'-fluoro nucleotide
  modified_base 17: mod_base = OTHER; note = 2'-O-Methyl nucleotide
  modified_base 18: mod_base = OTHER; note = 2'-fluoro nucleotide
  modified_base 19: mod_base = OTHER; note = 2'-O-Methyl nucleotide
  modified_base 20: mod_base = OTHER; note = deoxy-thymine phosphorothioate
  misc_feature 1..19: note = RNA
  misc_feature 20..21: note = DNA
ttcccaaggaccacctcactt

SEQ ID NO: 1360 - DNA, 21 bp, synthetic construct
  misc_feature 1..21: note = Description of Artificial Sequence: Synthetic oligonucleotide
  source 1..21: mol_type = other DNA
  modified_base 1: mod_base = OTHER; note = 2'-O-Methyl nucleotide
  modified_base 2: mod_base = OTHER; note = 2'-O-Methyl nucleotide
  modified_base 3: mod_base = OTHER; note = 2'-fluoro nucleotide
  modified_base 4: mod_base = OTHER; note = 2'-O-Methyl nucleotide
  modified_base 5: mod_base = OTHER; note = 2'-fluoro nucleotide
  modified_base 6: mod_base = OTHER; note = 2'-O-Methyl nucleotide
  modified_base 7: mod_base = OTHER; note = 2'-fluoro nucleotide
  modified_base 8: mod_base = OTHER; note = 2'-O-Methyl nucleotide
  modified_base 9: mod_base = OTHER; note = 2'-fluoro nucleotide
  modified_base 10: mod_base = OTHER; note = 2'-O-Methyl nucleotide
  modified_base 11: mod_base = OTHER; note = 2'-fluoro nucleotide
  modified_base 12: mod_base = OTHER; note = 2'-O-Methyl nucleotide
  modified_base 13: mod_base = OTHER; note = 2'-fluoro nucleotide
  modified_base 14: mod_base = OTHER; note = 2'-O-Methyl nucleotide
  modified_base 15: mod_base = OTHER; note = 2'-fluoro nucleotide
  modified_base 16: mod_base = OTHER; note = 2'-O-Methyl nucleotide
  modified_base 17: mod_base = OTHER; note = 2'-fluoro nucleotide
  modified_base 18: mod_base = OTHER; note = 2'-O-Methyl nucleotide
  modified_base 19: mod_base = OTHER; note = 2'-fluoro nucleotide
  modified_base 20: mod_base = OTHER; note = deoxy-thymine phosphorothioate
  misc_feature 1..19: note = RNA
  misc_feature 20..21: note = DNA
tggtccttgggaatttggatt

SEQ ID NO: 1361 - DNA, 21 bp, synthetic construct
  misc_feature 1..21: note = Description of Artificial Sequence: Synthetic oligonucleotide
  source 1..21: mol_type = other DNA
  modified_base 1: mod_base = OTHER; note = 2'-fluoro nucleotide
  modified_base 2: mod_base = OTHER; note = 2'-fluoro nucleotide
  modified_base 3: mod_base = OTHER; note = 2'-O-Methyl nucleotide
  modified_base 4: mod_base = OTHER; note = 2'-fluoro nucleotide
  modified_base 5: mod_base = OTHER; note = 2'-O-Methyl nucleotide
  modified_base 6: mod_base = OTHER; note = 2'-fluoro nucleotide
  modified_base 7: mod_base = OTHER; note = 2'-O-Methyl nucleotide
  modified_base 8: mod_base = OTHER; note = 2'-fluoro nucleotide
  modified_base 9: mod_base = OTHER; note = 2'-O-Methyl nucleotide
  modified_base 10: mod_base = OTHER; note = 2'-fluoro nucleotide
  modified_base 11: mod_base = OTHER; note = 2'-O-Methyl nucleotide
  modified_base 12: mod_base = OTHER; note = 2'-fluoro nucleotide
  modified_base 13: mod_base = OTHER; note = 2'-O-Methyl nucleotide
  modified_base 14: mod_base = OTHER; note = 2'-fluoro nucleotide
  modified_base 15: mod_base = OTHER; note = 2'-O-Methyl nucleotide
  modified_base 16: mod_base = OTHER; note = 2'-fluoro nucleotide
  modified_base 17: mod_base = OTHER; note = 2'-O-Methyl nucleotide
  modified_base 18: mod_base = OTHER; note = 2'-fluoro nucleotide
  modified_base 19: mod_base = OTHER; note = 2'-O-Methyl nucleotide
  modified_base 20: mod_base = OTHER; note = deoxy-thymine phosphorothioate
  misc_feature 1..19: note = RNA
  misc_feature 20..21: note = DNA
tccaaattcccaaggaccatt

SEQ ID NO: 1362 - DNA, 21 bp, synthetic construct
  misc_feature 1..21: note = Description of Artificial Sequence: Synthetic oligonucleotide
  source 1..21: mol_type = other DNA
  modified_base 1: mod_base = OTHER; note = 2'-O-Methyl nucleotide
  modified_base 2: mod_base = OTHER; note = 2'-O-Methyl nucleotide
  modified_base 3: mod_base = OTHER; note = 2'-fluoro nucleotide
  modified_base 4: mod_base = OTHER; note = 2'-O-Methyl nucleotide
  modified_base 5: mod_base = OTHER; note = 2'-fluoro nucleotide
  modified_base 6: mod_base = OTHER; note = 2'-O-Methyl nucleotide
  modified_base 7: mod_base = OTHER; note = 2'-fluoro nucleotide
  modified_base 8: mod_base = OTHER; note = 2'-O-Methyl nucleotide
  modified_base 9: mod_base = OTHER; note = 2'-fluoro nucleotide
  modified_base 10: mod_base = OTHER; note = 2'-O-Methyl nucleotide
  modified_base 11: mod_base = OTHER; note = 2'-fluoro nucleotide
  modified_base 12: mod_base = OTHER; note = 2'-O-Methyl nucleotide
  modified_base 13: mod_base = OTHER; note = 2'-fluoro nucleotide
  modified_base 14: mod_base = OTHER; note = 2'-O-Methyl nucleotide
  modified_base 15: mod_base = OTHER; note = 2'-fluoro nucleotide
  modified_base 16: mod_base = OTHER; note = 2'-O-Methyl nucleotide
  modified_base 17: mod_base = OTHER; note = 2'-fluoro nucleotide
  modified_base 18: mod_base = OTHER; note = 2'-O-Methyl nucleotide
  modified_base 19: mod_base = OTHER; note = 2'-fluoro nucleotide
  modified_base 20: mod_base = OTHER; note = deoxy-thymine phosphorothioate
  misc_feature 1..19: note = RNA
  misc_feature 20..21: note = DNA
ttgggaatttggaaattactt

SEQ ID NO: 1363 - DNA, 21 bp, synthetic construct
  misc_feature 1..21: note = Description of Artificial Sequence: Synthetic oligonucleotide
  source 1..21: mol_type = other DNA
  modified_base 1: mod_base = OTHER; note = 2'-fluoro nucleotide
  modified_base 2: mod_base = OTHER; note = 2'-fluoro nucleotide
  modified_base 3: mod_base = OTHER; note = 2'-O-Methyl nucleotide
  modified_base 4: mod_base = OTHER; note = 2'-fluoro nucleotide
  modified_base 5: mod_base = OTHER; note = 2'-O-Methyl nucleotide
  modified_base 6: mod_base = OTHER; note = 2'-fluoro nucleotide
  modified_base 7: mod_base = OTHER; note = 2'-O-Methyl nucleotide
  modified_base 8: mod_base = OTHER; note = 2'-fluoro nucleotide
  modified_base 9: mod_base = OTHER; note = 2'-O-Methyl nucleotide
  modified_base 10: mod_base = OTHER; note = 2'-fluoro nucleotide
  modified_base 11: mod_base = OTHER; note = 2'-O-Methyl nucleotide
  modified_base 12: mod_base = OTHER; note = 2'-fluoro nucleotide
  modified_base 13: mod_base = OTHER; note = 2'-O-Methyl nucleotide
  modified_base 14: mod_base = OTHER; note = 2'-fluoro nucleotide
  modified_base 15: mod_base = OTHER; note = 2'-O-Methyl nucleotide
  modified_base 16: mod_base = OTHER; note = 2'-fluoro nucleotide
  modified_base 17: mod_base = OTHER; note = 2'-O-Methyl nucleotide
  modified_base 18: mod_base = OTHER; note = 2'-fluoro nucleotide
  modified_base 19: mod_base = OTHER; note = 2'-O-Methyl nucleotide
  modified_base 20: mod_base = OTHER; note = deoxy-thymine phosphorothioate
  misc_feature 1..19: note = RNA
  misc_feature 20..21: note = DNA
gtaatttccaaattcccaatt

SEQ ID NO: 1364 - DNA, 21 bp, synthetic construct
  misc_feature 1..21: note = Description of Artificial Sequence: Synthetic oligonucleotide
  source 1..21: mol_type = other DNA
  modified_base 1: mod_base = OTHER; note = 2'-O-Methyl nucleotide
  modified_base 2: mod_base = OTHER; note = 2'-O-Methyl nucleotide
  modified_base 3: mod_base = OTHER; note = 2'-fluoro nucleotide
  modified_base 4: mod_base = OTHER; note = 2'-O-Methyl nucleotide
  modified_base 5: mod_base = OTHER; note = 2'-fluoro nucleotide
  modified_base 6: mod_base = OTHER; note = 2'-O-Methyl nucleotide
  modified_base 7: mod_base = OTHER; note = 2'-fluoro nucleotide
  modified_base 8: mod_base = OTHER; note = 2'-O-Methyl nucleotide
  modified_base 9: mod_base = OTHER; note = 2'-fluoro nucleotide
  modified_base 10: mod_base = OTHER; note = 2'-O-Methyl nucleotide
  modified_base 11: mod_base = OTHER; note = 2'-fluoro nucleotide
  modified_base 12: mod_base = OTHER; note = 2'-O-Methyl nucleotide
  modified_base 13: mod_base = OTHER; note = 2'-fluoro nucleotide
  modified_base 14: mod_base = OTHER; note = 2'-O-Methyl nucleotide
  modified_base 15: mod_base = OTHER; note = 2'-fluoro nucleotide
  modified_base 16: mod_base = OTHER; note = 2'-O-Methyl nucleotide
  modified_base 17: mod_base = OTHER; note = 2'-fluoro nucleotide
  modified_base 18: mod_base = OTHER; note = 2'-O-Methyl nucleotide
  modified_base 19: mod_base = OTHER; note = 2'-fluoro nucleotide
  modified_base 20: mod_base = OTHER; note = deoxy-thymine phosphorothioate
  misc_feature 1..19: note = RNA
  misc_feature 20..21: note = DNA
tgggaatttggaaattacctt

SEQ ID NO: 1365 - DNA, 21 bp, synthetic construct
  misc_feature 1..21: note = Description of Artificial Sequence: Synthetic oligonucleotide
  source 1..21: mol_type = other DNA
  modified_base 1: mod_base = OTHER; note = 2'-fluoro nucleotide
  modified_base 2: mod_base = OTHER; note = 2'-fluoro nucleotide
  modified_base 3: mod_base = OTHER; note = 2'-O-Methyl nucleotide
  modified_base 4: mod_base = OTHER; note = 2'-fluoro nucleotide
  modified_base 5: mod_base = OTHER; note = 2'-O-Methyl nucleotide
  modified_base 6: mod_base = OTHER; note = 2'-fluoro nucleotide
  modified_base 7: mod_base = OTHER; note = 2'-O-Methyl nucleotide
  modified_base 8: mod_base = OTHER; note = 2'-fluoro nucleotide
  modified_base 9: mod_base = OTHER; note = 2'-O-Methyl nucleotide
  modified_base 10: mod_base = OTHER; note = 2'-fluoro nucleotide
  modified_base 11: mod_base = OTHER; note = 2'-O-Methyl nucleotide
  modified_base 12: mod_base = OTHER; note = 2'-fluoro nucleotide
  modified_base 13: mod_base = OTHER; note = 2'-O-Methyl nucleotide
  modified_base 14: mod_base = OTHER; note = 2'-fluoro nucleotide
  modified_base 15: mod_base = OTHER; note = 2'-O-Methyl nucleotide
  modified_base 16: mod_base = OTHER; note = 2'-fluoro nucleotide
  modified_base 17: mod_base = OTHER; note = 2'-O-Methyl nucleotide
  modified_base 18: mod_base = OTHER; note = 2'-fluoro nucleotide
  modified_base 19: mod_base = OTHER; note = 2'-O-Methyl nucleotide
  modified_base 20: mod_base = OTHER; note = deoxy-thymine phosphorothioate
  misc_feature 1..19: note = RNA
  misc_feature 20..21: note = DNA
ggtaatttccaaattcccatt

SEQ ID NO: 1366 - DNA, 21 bp, synthetic construct
  misc_feature 1..21: note = Description of Artificial Sequence: Synthetic oligonucleotide
  source 1..21: mol_type = other DNA
  modified_base 1: mod_base = OTHER; note = 2'-O-Methyl nucleotide
  modified_base 2: mod_base = OTHER; note = 2'-O-Methyl nucleotide
  modified_base 3: mod_base = OTHER; note = 2'-fluoro nucleotide
  modified_base 4: mod_base = OTHER; note = 2'-O-Methyl nucleotide
  modified_base 5: mod_base = OTHER; note = 2'-fluoro nucleotide
  modified_base 6: mod_base = OTHER; note = 2'-O-Methyl nucleotide
  modified_base 7: mod_base = OTHER; note = 2'-fluoro nucleotide
  modified_base 8: mod_base = OTHER; note = 2'-O-Methyl nucleotide
  modified_base 9: mod_base = OTHER; note = 2'-fluoro nucleotide
  modified_base 10: mod_base = OTHER; note = 2'-O-Methyl nucleotide
  modified_base 11: mod_base = OTHER; note = 2'-fluoro nucleotide
  modified_base 12: mod_base = OTHER; note = 2'-O-Methyl nucleotide
  modified_base 13: mod_base = OTHER; note = 2'-fluoro nucleotide
  modified_base 14: mod_base = OTHER; note = 2'-O-Methyl nucleotide
  modified_base 15: mod_base = OTHER; note = 2'-fluoro nucleotide
  modified_base 16: mod_base = OTHER; note = 2'-O-Methyl nucleotide
  modified_base 17: mod_base = OTHER; note = 2'-fluoro nucleotide
  modified_base 18: mod_base = OTHER; note = 2'-O-Methyl nucleotide
  modified_base 19: mod_base = OTHER; note = 2'-fluoro nucleotide
  modified_base 20: mod_base = OTHER; note = deoxy-thymine phosphorothioate
  misc_feature 1..19: note = RNA
  misc_feature 20..21: note = DNA
gggaatttggaaattaccttt

SEQ ID NO: 1367 - DNA, 21 bp, synthetic construct
  misc_feature 1..21: note = Description of Artificial Sequence: Synthetic oligonucleotide
  source 1..21: mol_type = other DNA
  modified_base 1: mod_base = OTHER; note = 2'-fluoro nucleotide
  modified_base 2: mod_base = OTHER; note = 2'-fluoro nucleotide
  modified_base 3: mod_base = OTHER; note = 2'-O-Methyl nucleotide
  modified_base 4: mod_base = OTHER; note = 2'-fluoro nucleotide
  modified_base 5: mod_base = OTHER; note = 2'-O-Methyl nucleotide
  modified_base 6: mod_base = OTHER; note = 2'-fluoro nucleotide
  modified_base 7: mod_base = OTHER; note = 2'-O-Methyl nucleotide
  modified_base 8: mod_base = OTHER; note = 2'-fluoro nucleotide
  modified_base 9: mod_base = OTHER; note = 2'-O-Methyl nucleotide
  modified_base 10: mod_base = OTHER; note = 2'-fluoro nucleotide
  modified_base 11: mod_base = OTHER; note = 2'-O-Methyl nucleotide
  modified_base 12: mod_base = OTHER; note = 2'-fluoro nucleotide
  modified_base 13: mod_base = OTHER; note = 2'-O-Methyl nucleotide
  modified_base 14: mod_base = OTHER; note = 2'-fluoro nucleotide
  modified_base 15: mod_base = OTHER; note = 2'-O-Methyl nucleotide
  modified_base 16: mod_base = OTHER; note = 2'-fluoro nucleotide
  modified_base 17: mod_base = OTHER; note = 2'-O-Methyl nucleotide
  modified_base 18: mod_base = OTHER; note = 2'-fluoro nucleotide
  modified_base 19: mod_base = OTHER; note = 2'-O-Methyl nucleotide
  modified_base 20: mod_base = OTHER; note = deoxy-thymine phosphorothioate
  misc_feature 1..19: note = RNA
  misc_feature 20..21: note = DNA
aggtaatttccaaattccctt

SEQ ID NO: 1368 - DNA, 21 bp, synthetic construct
  misc_feature 1..21: note = Description of Artificial Sequence: Synthetic oligonucleotide
  source 1..21: mol_type = other DNA
  modified_base 1: mod_base = OTHER; note = 2'-O-Methyl nucleotide
  modified_base 2: mod_base = OTHER; note = 2'-O-Methyl nucleotide
  modified_base 3: mod_base = OTHER; note = 2'-fluoro nucleotide
  modified_base 4: mod_base = OTHER; note = 2'-O-Methyl nucleotide
  modified_base 5: mod_base = OTHER; note = 2'-fluoro nucleotide
  modified_base 6: mod_base = OTHER; note = 2'-O-Methyl nucleotide
  modified_base 7: mod_base = OTHER; note = 2'-fluoro nucleotide
  modified_base 8: mod_base = OTHER; note = 2'-O-Methyl nucleotide
  modified_base 9: mod_base = OTHER; note = 2'-fluoro nucleotide
  modified_base 10: mod_base = OTHER; note = 2'-O-Methyl nucleotide
  modified_base 11: mod_base = OTHER; note = 2'-fluoro nucleotide
  modified_base 12: mod_base = OTHER; note = 2'-O-Methyl nucleotide
  modified_base 13: mod_base = OTHER; note = 2'-fluoro nucleotide
  modified_base 14: mod_base = OTHER; note = 2'-O-Methyl nucleotide
  modified_base 15: mod_base = OTHER; note = 2'-fluoro nucleotide
  modified_base 16: mod_base = OTHER; note = 2'-O-Methyl nucleotide
  modified_base 17: mod_base = OTHER; note = 2'-fluoro nucleotide
  modified_base 18: mod_base = OTHER; note = 2'-O-Methyl nucleotide
  modified_base 19: mod_base = OTHER; note = 2'-fluoro nucleotide
  modified_base 20: mod_base = OTHER; note = deoxy-thymine phosphorothioate
  misc_feature 1..19: note = RNA
  misc_feature 20..21: note = DNA
ggaatttggaaattacctatt

SEQ ID NO: 1369 - DNA, 21 bp, synthetic construct
  misc_feature 1..21: note = Description of Artificial Sequence: Synthetic oligonucleotide
  source 1..21: mol_type = other DNA
  modified_base 1: mod_base = OTHER; note = 2'-fluoro nucleotide
  modified_base 2: mod_base = OTHER; note = 2'-fluoro nucleotide
  modified_base 3: mod_base = OTHER; note = 2'-O-Methyl nucleotide
  modified_base 4: mod_base = OTHER; note = 2'-fluoro nucleotide
  modified_base 5: mod_base = OTHER; note = 2'-O-Methyl nucleotide
  modified_base 6: mod_base = OTHER; note = 2'-fluoro nucleotide
  modified_base 7: mod_base = OTHER; note = 2'-O-Methyl nucleotide
  modified_base 8: mod_base = OTHER; note = 2'-fluoro nucleotide
  modified_base 9: mod_base = OTHER; note = 2'-O-Methyl nucleotide
  modified_base 10: mod_base = OTHER; note = 2'-fluoro nucleotide
  modified_base 11: mod_base = OTHER; note = 2'-O-Methyl nucleotide
  modified_base 12: mod_base = OTHER; note = 2'-fluoro nucleotide
  modified_base 13: mod_base = OTHER; note = 2'-O-Methyl nucleotide
  modified_base 14: mod_base = OTHER; note = 2'-fluoro nucleotide
  modified_base 15: mod_base = OTHER; note = 2'-O-Methyl nucleotide
  modified_base 16: mod_base = OTHER; note = 2'-fluoro nucleotide
  modified_base 17: mod_base = OTHER; note = 2'-O-Methyl nucleotide
  modified_base 18: mod_base = OTHER; note = 2'-fluoro nucleotide
  modified_base 19: mod_base = OTHER; note = 2'-O-Methyl nucleotide
  modified_base 20: mod_base = OTHER; note = deoxy-thymine phosphorothioate
  misc_feature 1..19: note = RNA
  misc_feature 20..21: note = DNA
taggtaatttccaaattcctt

SEQ ID NO: 1370 - DNA, 21 bp, synthetic construct
  misc_feature 1..21: note = Description of Artificial Sequence: Synthetic oligonucleotide
  source 1..21: mol_type = other DNA
  modified_base 1: mod_base = OTHER; note = 2'-O-Methyl nucleotide
  modified_base 2: mod_base = OTHER; note = 2'-O-Methyl nucleotide
  modified_base 3: mod_base = OTHER; note = 2'-fluoro nucleotide
  modified_base 4: mod_base = OTHER; note = 2'-O-Methyl nucleotide
  modified_base 5: mod_base = OTHER; note = 2'-fluoro nucleotide
  modified_base 6: mod_base = OTHER; note = 2'-O-Methyl nucleotide
  modified_base 7: mod_base = OTHER; note = 2'-fluoro nucleotide
  modified_base 8: mod_base = OTHER; note = 2'-O-Methyl nucleotide
  modified_base 9: mod_base = OTHER; note = 2'-fluoro nucleotide
  modified_base 10: mod_base = OTHER; note = 2'-O-Methyl nucleotide
  modified_base 11: mod_base = OTHER; note = 2'-fluoro nucleotide
  modified_base 12: mod_base = OTHER; note = 2'-O-Methyl nucleotide
  modified_base 13: mod_base = OTHER; note = 2'-fluoro nucleotide
  modified_base 14: mod_base = OTHER; note = 2'-O-Methyl nucleotide
  modified_base 15: mod_base = OTHER; note = 2'-fluoro nucleotide
  modified_base 16: mod_base = OTHER; note = 2'-O-Methyl nucleotide
  modified_base 17: mod_base = OTHER; note = 2'-fluoro nucleotide
  modified_base 18: mod_base = OTHER; note = 2'-O-Methyl nucleotide
  modified_base 19: mod_base = OTHER; note = 2'-fluoro nucleotide
  modified_base 20: mod_base = OTHER; note = deoxy-thymine phosphorothioate
  misc_feature 1..19: note = RNA
  misc_feature 20..21: note = DNA
agaggaattatgatctttctt

SEQ ID NO: 1371 - DNA, 21 bp, synthetic construct
  misc_feature 1..21: note = Description of Artificial Sequence: Synthetic oligonucleotide
  source 1..21: mol_type = other DNA
  modified_base 1: mod_base = OTHER; note = 2'-fluoro nucleotide
  modified_base 2: mod_base = OTHER; note = 2'-fluoro nucleotide
  modified_base 3: mod_base = OTHER; note = 2'-O-Methyl nucleotide
  modified_base 4: mod_base = OTHER; note = 2'-fluoro nucleotide
  modified_base 5: mod_base = OTHER; note = 2'-O-Methyl nucleotide
  modified_base 6: mod_base = OTHER; note = 2'-fluoro nucleotide
  modified_base 7: mod_base = OTHER; note = 2'-O-Methyl nucleotide
  modified_base 8: mod_base = OTHER; note = 2'-fluoro nucleotide
  modified_base 9: mod_base = OTHER; note = 2'-O-Methyl nucleotide
  modified_base 10: mod_base = OTHER; note = 2'-fluoro nucleotide
  modified_base 11: mod_base = OTHER; note = 2'-O-Methyl nucleotide
  modified_base 12: mod_base = OTHER; note = 2'-fluoro nucleotide
  modified_base 13: mod_base = OTHER; note = 2'-O-Methyl nucleotide
  modified_base 14: mod_base = OTHER; note = 2'-fluoro nucleotide
  modified_base 15: mod_base = OTHER; note = 2'-O-Methyl nucleotide
  modified_base 16: mod_base = OTHER; note = 2'-fluoro nucleotide
  modified_base 17: mod_base = OTHER; note = 2'-O-Methyl nucleotide
  modified_base 18: mod_base = OTHER; note = 2'-fluoro nucleotide
  modified_base 19: mod_base = OTHER; note = 2'-O-Methyl nucleotide
  modified_base 20: mod_base = OTHER; note = deoxy-thymine phosphorothioate
  misc_feature 1..19: note = RNA
  misc_feature 20..21: note = DNA
gaaagatcataattcctcttt

SEQ ID NO: 1372 - DNA, 21 bp, synthetic construct
  misc_feature 1..21: note = Description of Artificial Sequence: Synthetic oligonucleotide
  source 1..21: mol_type = other DNA
  modified_base 1: mod_base = OTHER; note = 2'-O-Methyl nucleotide
  modified_base 2: mod_base = OTHER; note = 2'-O-Methyl nucleotide
  modified_base 3: mod_base = OTHER; note = 2'-fluoro nucleotide
  modified_base 4: mod_base = OTHER; note = 2'-O-Methyl nucleotide
  modified_base 5: mod_base = OTHER; note = 2'-fluoro nucleotide
  modified_base 6: mod_base = OTHER; note = 2'-O-Methyl nucleotide
  modified_base 7: mod_base = OTHER; note = 2'-fluoro nucleotide
  modified_base 8: mod_base = OTHER; note = 2'-O-Methyl nucleotide
  modified_base 9: mod_base = OTHER; note = 2'-fluoro nucleotide
  modified_base 10: mod_base = OTHER; note = 2'-O-Methyl nucleotide
  modified_base 11: mod_base = OTHER; note = 2'-fluoro nucleotide
  modified_base 12: mod_base = OTHER; note = 2'-O-Methyl nucleotide
  modified_base 13: mod_base = OTHER; note = 2'-fluoro nucleotide
  modified_base 14: mod_base = OTHER; note = 2'-O-Methyl nucleotide
  modified_base 15: mod_base = OTHER; note = 2'-fluoro nucleotide
  modified_base 16: mod_base = OTHER; note = 2'-O-Methyl nucleotide
  modified_base 17: mod_base = OTHER; note = 2'-fluoro nucleotide
  modified_base 18: mod_base = OTHER; note = 2'-O-Methyl nucleotide
  modified_base 19: mod_base = OTHER; note = 2'-fluoro nucleotide
  modified_base 20: mod_base = OTHER; note = deoxy-thymine phosphorothioate
  misc_feature 1..19: note = RNA
  misc_feature 20..21: note = DNA
gaggaattatgatctttcctt

SEQ ID NO: 1373 - DNA, 21 bp, synthetic construct
  misc_feature 1..21: note = Description of Artificial Sequence: Synthetic oligonucleotide
  source 1..21: mol_type = other DNA
  modified_base 1: mod_base = OTHER; note = 2'-fluoro nucleotide
  modified_base 2: mod_base = OTHER; note = 2'-fluoro nucleotide
  modified_base 3: mod_base = OTHER; note = 2'-O-Methyl nucleotide
  modified_base 4: mod_base = OTHER; note = 2'-fluoro nucleotide
  modified_base 5: mod_base = OTHER; note = 2'-O-Methyl nucleotide
  modified_base 6: mod_base = OTHER; note = 2'-fluoro nucleotide
  modified_base 7: mod_base = OTHER; note = 2'-O-Methyl nucleotide
  modified_base 8: mod_base = OTHER; note = 2'-fluoro nucleotide
  modified_base 9: mod_base = OTHER; note = 2'-O-Methyl nucleotide
  modified_base 10: mod_base = OTHER; note = 2'-fluoro nucleotide
  modified_base 11: mod_base = OTHER; note = 2'-O-Methyl nucleotide
  modified_base 12: mod_base = OTHER; note = 2'-fluoro nucleotide
  modified_base 13: mod_base = OTHER; note = 2'-O-Methyl nucleotide
  modified_base 14: mod_base = OTHER; note = 2'-fluoro nucleotide
  modified_base 15: mod_base = OTHER; note = 2'-O-Methyl nucleotide
  modified_base 16: mod_base = OTHER; note = 2'-fluoro nucleotide
  modified_base 17: mod_base = OTHER; note = 2'-O-Methyl nucleotide
  modified_base 18: mod_base = OTHER; note = 2'-fluoro nucleotide
  modified_base 19: mod_base = OTHER; note = 2'-O-Methyl nucleotide
  modified_base 20: mod_base = OTHER; note = deoxy-thymine phosphorothioate
  misc_feature 1..19: note = RNA
  misc_feature 20..21: note = DNA
ggaaagatcataattcctctt

SEQ ID NO: 1374 - DNA, 21 bp, synthetic construct
  misc_feature 1..21: note = Description of Artificial Sequence: Synthetic oligonucleotide
  source 1..21: mol_type = other DNA
  modified_base 1: mod_base = OTHER; note = 2'-O-Methyl nucleotide
  modified_base 2: mod_base = OTHER; note = 2'-O-Methyl nucleotide
  modified_base 3: mod_base = OTHER; note = 2'-fluoro nucleotide
  modified_base 4: mod_base = OTHER; note = 2'-O-Methyl nucleotide
  modified_base 5: mod_base = OTHER; note = 2'-fluoro nucleotide
  modified_base 6: mod_base = OTHER; note = 2'-O-Methyl nucleotide
  modified_base 7: mod_base = OTHER; note = 2'-fluoro nucleotide
  modified_base 8: mod_base = OTHER; note = 2'-O-Methyl nucleotide
  modified_base 9: mod_base = OTHER; note = 2'-fluoro nucleotide
  modified_base 10: mod_base = OTHER; note = 2'-O-Methyl nucleotide
  modified_base 11: mod_base = OTHER; note = 2'-fluoro nucleotide
  modified_base 12: mod_base = OTHER; note = 2'-O-Methyl nucleotide
  modified_base 13: mod_base = OTHER; note = 2'-fluoro nucleotide
  modified_base 14: mod_base = OTHER; note = 2'-O-Methyl nucleotide
  modified_base 15: mod_base = OTHER; note = 2'-fluoro nucleotide
  modified_base 16: mod_base = OTHER; note = 2'-O-Methyl nucleotide
  modified_base 17: mod_base = OTHER; note = 2'-fluoro nucleotide
  modified_base 18: mod_base = OTHER; note = 2'-O-Methyl nucleotide
  modified_base 19: mod_base = OTHER; note = 2'-fluoro nucleotide
  modified_base 20: mod_base = OTHER; note = deoxy-thymine phosphorothioate
  misc_feature 1..19: note = RNA
  misc_feature 20..21: note = DNA
aattatgatctttccttcttt

SEQ ID NO: 1375 - DNA, 21 bp, synthetic construct
  misc_feature 1..21: note = Description of Artificial Sequence: Synthetic oligonucleotide
  source 1..21: mol_type = other DNA
  modified_base 1: mod_base = OTHER; note = 2'-fluoro nucleotide
  modified_base 2: mod_base = OTHER; note = 2'-fluoro nucleotide
  modified_base 3: mod_base = OTHER; note = 2'-O-Methyl nucleotide
  modified_base 4: mod_base = OTHER; note = 2'-fluoro nucleotide
  modified_base 5: mod_base = OTHER; note = 2'-O-Methyl nucleotide
  modified_base 6: mod_base = OTHER; note = 2'-fluoro nucleotide
  modified_base 7: mod_base = OTHER; note = 2'-O-Methyl nucleotide
  modified_base 8: mod_base = OTHER; note = 2'-fluoro nucleotide
  modified_base 9: mod_base = OTHER; note = 2'-O-Methyl nucleotide
  modified_base 10: mod_base = OTHER; note = 2'-fluoro nucleotide
  modified_base 11: mod_base = OTHER; note = 2'-O-Methyl nucleotide
  modified_base 12: mod_base = OTHER; note = 2'-fluoro nucleotide
  modified_base 13: mod_base = OTHER; note = 2'-O-Methyl nucleotide
  modified_base 14: mod_base = OTHER; note = 2'-fluoro nucleotide
  modified_base 15: mod_base = OTHER; note = 2'-O-Methyl nucleotide
  modified_base 16: mod_base = OTHER; note = 2'-fluoro nucleotide
  modified_base 17: mod_base = OTHER; note = 2'-O-Methyl nucleotide
  modified_base 18: mod_base = OTHER; note = 2'-fluoro nucleotide
  modified_base 19: mod_base = OTHER; note = 2'-O-Methyl nucleotide
  modified_base 20: mod_base = OTHER; note = deoxy-thymine phosphorothioate
  misc_feature 1..19: note = RNA
  misc_feature 20..21: note = DNA
agaaggaaagatcataatttt

SEQ ID NO: 1376 - DNA, 21 bp, synthetic construct
  misc_feature 1..21: note = Description of Artificial Sequence: Synthetic oligonucleotide
  source 1..21: mol_type = other DNA
  modified_base 1: mod_base = OTHER; note = 2'-O-Methyl nucleotide
  modified_base 2: mod_base = OTHER; note = 2'-O-Methyl nucleotide
  modified_base 3: mod_base = OTHER; note = 2'-fluoro nucleotide
  modified_base 4: mod_base = OTHER; note = 2'-O-Methyl nucleotide
  modified_base 5: mod_base = OTHER; note = 2'-fluoro nucleotide
  modified_base 6: mod_base = OTHER; note = 2'-O-Methyl nucleotide
  modified_base 7: mod_base = OTHER; note = 2'-fluoro nucleotide
  modified_base 8: mod_base = OTHER; note = 2'-O-Methyl nucleotide
  modified_base 9: mod_base = OTHER; note = 2'-fluoro nucleotide
  modified_base 10: mod_base = OTHER; note = 2'-O-Methyl nucleotide
  modified_base 11: mod_base = OTHER; note = 2'-fluoro nucleotide
  modified_base 12: mod_base = OTHER; note = 2'-O-Methyl nucleotide
  modified_base 13: mod_base = OTHER; note = 2'-fluoro nucleotide
  modified_base 14: mod_base = OTHER; note = 2'-O-Methyl nucleotide
  modified_base 15: mod_base = OTHER; note = 2'-fluoro nucleotide
  modified_base 16: mod_base = OTHER; note = 2'-O-Methyl nucleotide
  modified_base 17: mod_base = OTHER; note = 2'-fluoro nucleotide
  modified_base 18: mod_base = OTHER; note = 2'-O-Methyl nucleotide
  modified_base 19: mod_base = OTHER; note = 2'-fluoro nucleotide
  modified_base 20: mod_base = OTHER; note = deoxy-thymine phosphorothioate
  misc_feature 1..19: note = RNA
  misc_feature 20..21: note = DNA
attatgatctttccttctttt

SEQ ID NO: 1377 - DNA, 21 bp, synthetic construct
  misc_feature 1..21: note = Description of Artificial Sequence: Synthetic oligonucleotide
  source 1..21: mol_type = other DNA
  modified_base 1: mod_base = OTHER; note = 2'-fluoro nucleotide
  modified_base 2: mod_base = OTHER; note = 2'-fluoro nucleotide
  modified_base 3: mod_base = OTHER; note = 2'-O-Methyl nucleotide
  modified_base 4: mod_base = OTHER; note = 2'-fluoro nucleotide
  modified_base 5: mod_base = OTHER; note = 2'-O-Methyl nucleotide
  modified_base 6: mod_base = OTHER; note = 2'-fluoro nucleotide
  modified_base 7: mod_base = OTHER; note = 2'-O-Methyl nucleotide
  modified_base 8: mod_base = OTHER; note = 2'-fluoro nucleotide
  modified_base 9: mod_base = OTHER; note = 2'-O-Methyl nucleotide
  modified_base 10: mod_base = OTHER; note = 2'-fluoro nucleotide
  modified_base 11: mod_base = OTHER; note = 2'-O-Methyl nucleotide
  modified_base 12: mod_base = OTHER; note = 2'-fluoro nucleotide
  modified_base 13: mod_base = OTHER; note = 2'-O-Methyl nucleotide
  modified_base 14: mod_base = OTHER; note = 2'-fluoro nucleotide
  modified_base 15: mod_base = OTHER; note = 2'-O-Methyl nucleotide
  modified_base 16: mod_base = OTHER; note = 2'-fluoro nucleotide
  modified_base 17: mod_base = OTHER; note = 2'-O-Methyl nucleotide
  modified_base 18: mod_base = OTHER; note = 2'-fluoro nucleotide
  modified_base 19: mod_base = OTHER; note = 2'-O-Methyl nucleotide
  modified_base 20: mod_base = OTHER; note = deoxy-thymine phosphorothioate
  misc_feature 1..19: note = RNA
  misc_feature 20..21: note = DNA
aagaaggaaagatcataattt

SEQ ID NO: 1378 - DNA, 21 bp, synthetic construct
  misc_feature 1..21: note = Description of Artificial Sequence: Synthetic oligonucleotide
  source 1..21: mol_type = other DNA
  modified_base 1: mod_base = OTHER; note = 2'-O-Methyl nucleotide
  modified_base 2: mod_base = OTHER; note = 2'-O-Methyl nucleotide
  modified_base 3: mod_base = OTHER; note = 2'-fluoro nucleotide
  modified_base 4: mod_base = OTHER; note = 2'-O-Methyl nucleotide
  modified_base 5: mod_base = OTHER; note = 2'-fluoro nucleotide
  modified_base 6: mod_base = OTHER; note = 2'-O-Methyl nucleotide
  modified_base 7: mod_base = OTHER; note = 2'-fluoro nucleotide
  modified_base 8: mod_base = OTHER; note = 2'-O-Methyl nucleotide
  modified_base 9: mod_base = OTHER; note = 2'-fluoro nucleotide
  modified_base 10: mod_base = OTHER; note = 2'-O-Methyl nucleotide
  modified_base 11: mod_base = OTHER; note = 2'-fluoro nucleotide
  modified_base 12: mod_base = OTHER; note = 2'-O-Methyl nucleotide
  modified_base 13: mod_base = OTHER; note = 2'-fluoro nucleotide
  modified_base 14: mod_base = OTHER; note = 2'-O-Methyl nucleotide
  modified_base 15: mod_base = OTHER; note = 2'-fluoro nucleotide
  modified_base 16: mod_base = OTHER; note = 2'-O-Methyl nucleotide
  modified_base 17: mod_base = OTHER; note = 2'-fluoro nucleotide
  modified_base 18: mod_base = OTHER; note = 2'-O-Methyl nucleotide
  modified_base 19: mod_base = OTHER; note = 2'-fluoro nucleotide
  modified_base 20: mod_base = OTHER; note = deoxy-thymine phosphorothioate
  misc_feature 1..19: note = RNA
  misc_feature 20..21: note = DNA
tatgatctttccttcttaatt

SEQ ID NO: 1379 - DNA, 21 bp, synthetic construct
  misc_feature 1..21: note = Description of Artificial Sequence: Synthetic oligonucleotide
  source 1..21: mol_type = other DNA
  modified_base 1: mod_base = OTHER; note = 2'-fluoro nucleotide
  modified_base 2: mod_base = OTHER; note = 2'-fluoro nucleotide
  modified_base 3: mod_base = OTHER; note = 2'-O-Methyl nucleotide
  modified_base 4: mod_base = OTHER; note = 2'-fluoro nucleotide
  modified_base 5: mod_base = OTHER; note = 2'-O-Methyl nucleotide
  modified_base 6: mod_base = OTHER; note = 2'-fluoro nucleotide
  modified_base 7: mod_base = OTHER; note = 2'-O-Methyl nucleotide
  modified_base 8: mod_base = OTHER; note = 2'-fluoro nucleotide
  modified_base 9: mod_base = OTHER; note = 2'-O-Methyl nucleotide
  modified_base 10: mod_base = OTHER; note = 2'-fluoro nucleotide
  modified_base 11: mod_base = OTHER; note = 2'-O-Methyl nucleotide
  modified_base 12: mod_base = OTHER; note = 2'-fluoro nucleotide
  modified_base 13: mod_base = OTHER; note = 2'-O-Methyl nucleotide
  modified_base 14: mod_base = OTHER; note = 2'-fluoro nucleotide
  modified_base 15: mod_base = OTHER; note = 2'-O-Methyl nucleotide
  modified_base 16: mod_base = OTHER; note = 2'-fluoro nucleotide
  modified_base 17: mod_base = OTHER; note = 2'-O-Methyl nucleotide
  modified_base 18: mod_base = OTHER; note = 2'-fluoro nucleotide
  modified_base 19: mod_base = OTHER; note = 2'-O-Methyl nucleotide
  modified_base 20: mod_base = OTHER; note = deoxy-thymine phosphorothioate
  misc_feature 1..19: note = RNA
  misc_feature 20..21: note = DNA
ttaagaaggaaagatcatatt

SEQ ID NO: 1380 - DNA, 21 bp, synthetic construct
  misc_feature 1..21: note = Description of Artificial Sequence: Synthetic oligonucleotide
  source 1..21: mol_type = other DNA
  modified_base 1: mod_base = OTHER; note = 2'-O-Methyl nucleotide
  modified_base 2: mod_base = OTHER; note = 2'-O-Methyl nucleotide
  modified_base 3: mod_base = OTHER; note = 2'-fluoro nucleotide
  modified_base 4: mod_base = OTHER; note = 2'-O-Methyl nucleotide
  modified_base 5: mod_base = OTHER; note = 2'-fluoro nucleotide
  modified_base 6: mod_base = OTHER; note = 2'-O-Methyl nucleotide
  modified_base 7: mod_base = OTHER; note = 2'-fluoro nucleotide
  modified_base 8: mod_base = OTHER; note = 2'-O-Methyl nucleotide
  modified_base 9: mod_base = OTHER; note = 2'-fluoro nucleotide
  modified_base 10: mod_base = OTHER; note = 2'-O-Methyl nucleotide
  modified_base 11: mod_base = OTHER; note = 2'-fluoro nucleotide
  modified_base 12: mod_base = OTHER; note = 2'-O-Methyl nucleotide
  modified_base 13: mod_base = OTHER; note = 2'-fluoro nucleotide
  modified_base 14: mod_base = OTHER; note = 2'-O-Methyl nucleotide
  modified_base 15: mod_base = OTHER; note = 2'-fluoro nucleotide
  modified_base 16: mod_base = OTHER; note = 2'-O-Methyl nucleotide
  modified_base 17: mod_base = OTHER; note = 2'-fluoro nucleotide
  modified_base 18: mod_base = OTHER; note = 2'-O-Methyl nucleotide
  modified_base 19: mod_base = OTHER; note = 2'-fluoro nucleotide
  modified_base 20: mod_base = OTHER; note = deoxy-thymine phosphorothioate
  misc_feature 1..19: note = RNA
  misc_feature 20..21: note = DNA
tgatctttccttcttaaagtt

SEQ ID NO: 1381 - DNA, 21 bp, synthetic construct
  misc_feature 1..21: note = Description of Artificial Sequence: Synthetic oligonucleotide
  source 1..21: mol_type = other DNA
  modified_base 1: mod_base = OTHER; note = 2'-fluoro nucleotide
  modified_base 2: mod_base = OTHER; note = 2'-fluoro nucleotide
  modified_base 3: mod_base = OTHER; note = 2'-O-Methyl nucleotide
  modified_base 4: mod_base = OTHER; note = 2'-fluoro nucleotide
  modified_base 5: mod_base = OTHER; note = 2'-O-Methyl nucleotide
  modified_base 6: mod_base = OTHER; note = 2'-fluoro nucleotide
  modified_base 7: mod_base = OTHER; note = 2'-O-Methyl nucleotide
  modified_base 8: mod_base = OTHER; note = 2'-fluoro nucleotide
  modified_base 9: mod_base = OTHER; note = 2'-O-Methyl nucleotide
  modified_base 10: mod_base = OTHER; note = 2'-fluoro nucleotide
  modified_base 11: mod_base = OTHER; note = 2'-O-Methyl nucleotide
  modified_base 12: mod_base = OTHER; note = 2'-fluoro nucleotide
  modified_base 13: mod_base = OTHER; note = 2'-O-Methyl nucleotide
  modified_base 14: mod_base = OTHER; note = 2'-fluoro nucleotide
  modified_base 15: mod_base = OTHER; note = 2'-O-Methyl nucleotide
  modified_base 16: mod_base = OTHER; note = 2'-fluoro nucleotide
  modified_base 17: mod_base = OTHER; note = 2'-O-Methyl nucleotide
  modified_base 18: mod_base = OTHER; note = 2'-fluoro nucleotide
  modified_base 19: mod_base = OTHER; note = 2'-O-Methyl nucleotide
  modified_base 20: mod_base = OTHER; note = deoxy-thymine phosphorothioate
  misc_feature 1..19: note = RNA
  misc_feature 20..21: note = DNA
ctttaagaaggaaagatcatt

SEQ ID NO: 1382 - DNA, 21 bp, synthetic construct
  misc_feature 1..21: note = Description of Artificial Sequence: Synthetic oligonucleotide
  source 1..21: mol_type = other DNA
  modified_base 1: mod_base = OTHER; note = 2'-O-Methyl nucleotide
  modified_base 2: mod_base = OTHER; note = 2'-O-Methyl nucleotide
  modified_base 3: mod_base = OTHER; note = 2'-fluoro nucleotide
  modified_base 4: mod_base = OTHER; note = 2'-O-Methyl nucleotide
  modified_base 5: mod_base = OTHER; note = 2'-fluoro nucleotide
  modified_base 6: mod_base = OTHER; note = 2'-O-Methyl nucleotide
  modified_base 7: mod_base = OTHER; note = 2'-fluoro nucleotide
  modified_base 8: mod_base = OTHER; note = 2'-O-Methyl nucleotide
  modified_base 9: mod_base = OTHER; note = 2'-fluoro nucleotide
  modified_base 10: mod_base = OTHER; note = 2'-O-Methyl nucleotide
  modified_base 11: mod_base = OTHER; note = 2'-fluoro nucleotide
  modified_base 12: mod_base = OTHER; note = 2'-O-Methyl nucleotide
  modified_base 13: mod_base = OTHER; note = 2'-fluoro nucleotide
  modified_base 14: mod_base = OTHER; note = 2'-O-Methyl nucleotide
  modified_base 15: mod_base = OTHER; note = 2'-fluoro nucleotide
  modified_base 16: mod_base = OTHER; note = 2'-O-Methyl nucleotide
  modified_base 17: mod_base = OTHER; note = 2'-fluoro nucleotide
  modified_base 18: mod_base = OTHER; note = 2'-O-Methyl nucleotide
  modified_base 19: mod_base = OTHER; note = 2'-fluoro nucleotide
  modified_base 20: mod_base = OTHER; note = deoxy-thymine phosphorothioate
  misc_feature 1..19: note = RNA
  misc_feature 20..21: note = DNA
tctttccttcttaaagacctt

SEQ ID NO: 1383 - DNA, 21 bp, synthetic construct
  misc_feature 1..21: note = Description of Artificial Sequence: Synthetic oligonucleotide
  source 1..21: mol_type = other DNA
  modified_base 1: mod_base = OTHER; note = 2'-fluoro nucleotide
  modified_base 2: mod_base = OTHER; note = 2'-fluoro nucleotide
  modified_base 3: mod_base = OTHER; note = 2'-O-Methyl nucleotide
  modified_base 4: mod_base = OTHER; note = 2'-fluoro nucleotide
  modified_base 5: mod_base = OTHER; note = 2'-O-Methyl nucleotide
  modified_base 6: mod_base = OTHER; note = 2'-fluoro nucleotide
  modified_base 7: mod_base = OTHER; note = 2'-O-Methyl nucleotide
  modified_base 8: mod_base = OTHER; note = 2'-fluoro nucleotide
  modified_base 9: mod_base = OTHER; note = 2'-O-Methyl nucleotide
  modified_base 10: mod_base = OTHER; note = 2'-fluoro nucleotide
  modified_base 11: mod_base = OTHER; note = 2'-O-Methyl nucleotide
  modified_base 12: mod_base = OTHER; note = 2'-fluoro nucleotide
  modified_base 13: mod_base = OTHER; note = 2'-O-Methyl nucleotide
  modified_base 14: mod_base = OTHER; note = 2'-fluoro nucleotide
  modified_base 15: mod_base = OTHER; note = 2'-O-Methyl nucleotide
  modified_base 16: mod_base = OTHER; note = 2'-fluoro nucleotide
  modified_base 17: mod_base = OTHER; note = 2'-O-Methyl nucleotide
  modified_base 18: mod_base = OTHER; note = 2'-fluoro nucleotide
  modified_base 19: mod_base = OTHER; note = 2'-O-Methyl nucleotide
  modified_base 20: mod_base = OTHER; note = deoxy-thymine phosphorothioate
  misc_feature 1..19: note = RNA
  misc_feature 20..21: note = DNA
ggtctttaagaaggaaagatt

SEQ ID NO: 1384 - DNA, 21 bp, synthetic construct
  misc_feature 1..21: note = Description of Artificial Sequence: Synthetic oligonucleotide
  source 1..21: mol_type = other DNA
  modified_base 1: mod_base = OTHER; note = 2'-O-Methyl nucleotide
  modified_base 2: mod_base = OTHER; note = 2'-O-Methyl nucleotide
  modified_base 3: mod_base = OTHER; note = 2'-fluoro nucleotide
  modified_base 4: mod_base = OTHER; note = 2'-O-Methyl nucleotide
  modified_base 5: mod_base = OTHER; note = 2'-fluoro nucleotide
  modified_base 6: mod_base = OTHER; note = 2'-O-Methyl nucleotide
  modified_base 7: mod_base = OTHER; note = 2'-fluoro nucleotide
  modified_base 8: mod_base = OTHER; note = 2'-O-Methyl nucleotide
  modified_base 9: mod_base = OTHER; note = 2'-fluoro nucleotide
  modified_base 10: mod_base = OTHER; note = 2'-O-Methyl nucleotide
  modified_base 11: mod_base = OTHER; note = 2'-fluoro nucleotide
  modified_base 12: mod_base = OTHER; note = 2'-O-Methyl nucleotide
  modified_base 13: mod_base = OTHER; note = 2'-fluoro nucleotide
  modified_base 14: mod_base = OTHER; note = 2'-O-Methyl nucleotide
  modified_base 15: mod_base = OTHER; note = 2'-fluoro nucleotide
  modified_base 16: mod_base = OTHER; note = 2'-O-Methyl nucleotide
  modified_base 17: mod_base = OTHER; note = 2'-fluoro nucleotide
  modified_base 18: mod_base = OTHER; note = 2'-O-Methyl nucleotide
  modified_base 19: mod_base = OTHER; note = 2'-fluoro nucleotide
  modified_base 20: mod_base = OTHER; note = deoxy-thymine phosphorothioate
  misc_feature 1..19: note = RNA
  misc_feature 20..21: note = DNA
ccttcttaaagaccatccatt

SEQ ID NO: 1385 - DNA, 21 bp, synthetic construct
  misc_feature 1..21: note = Description of Artificial Sequence: Synthetic oligonucleotide
  source 1..21: mol_type = other DNA
  modified_base 1: mod_base = OTHER; note = 2'-fluoro nucleotide
  modified_base 2: mod_base = OTHER; note = 2'-fluoro nucleotide
  modified_base 3: mod_base = OTHER; note = 2'-O-Methyl nucleotide
  modified_base 4: mod_base = OTHER; note = 2'-fluoro nucleotide
  modified_base 5: mod_base = OTHER; note = 2'-O-Methyl nucleotide
  modified_base 6: mod_base = OTHER; note = 2'-fluoro nucleotide
  modified_base 7: mod_base = OTHER; note = 2'-O-Methyl nucleotide
  modified_base 8: mod_base = OTHER; note = 2'-fluoro nucleotide
  modified_base 9: mod_base = OTHER; note = 2'-O-Methyl nucleotide
  modified_base 10: mod_base = OTHER; note = 2'-fluoro nucleotide
  modified_base 11: mod_base = OTHER; note = 2'-O-Methyl nucleotide
  modified_base 12: mod_base = OTHER; note = 2'-fluoro nucleotide
  modified_base 13: mod_base = OTHER; note = 2'-O-Methyl nucleotide
  modified_base 14: mod_base = OTHER; note = 2'-fluoro nucleotide
  modified_base 15: mod_base = OTHER; note = 2'-O-Methyl nucleotide
  modified_base 16: mod_base = OTHER; note = 2'-fluoro nucleotide
  modified_base 17: mod_base = OTHER; note = 2'-O-Methyl nucleotide
  modified_base 18: mod_base = OTHER; note = 2'-fluoro nucleotide
  modified_base 19: mod_base = OTHER; note = 2'-O-Methyl nucleotide
  modified_base 20: mod_base = OTHER; note = deoxy-thymine phosphorothioate
  misc_feature 1..19: note = RNA
  misc_feature 20..21: note = DNA
tggatggtctttaagaaggtt

SEQ ID NO: 1386 - DNA, 21 bp, synthetic construct
  misc_feature 1..21: note = Description of Artificial Sequence: Synthetic oligonucleotide
  source 1..21: mol_type = other DNA
  modified_base 1: mod_base = OTHER; note = 2'-O-Methyl nucleotide
  modified_base 2: mod_base = OTHER; note = 2'-O-Methyl nucleotide
  modified_base 3: mod_base = OTHER; note = 2'-fluoro nucleotide
  modified_base 4: mod_base = OTHER; note = 2'-O-Methyl nucleotide
  modified_base 5: mod_base = OTHER; note = 2'-fluoro nucleotide
  modified_base 6: mod_base = OTHER; note = 2'-O-Methyl nucleotide
  modified_base 7: mod_base = OTHER; note = 2'-fluoro nucleotide
  modified_base 8: mod_base = OTHER; note = 2'-O-Methyl nucleotide
  modified_base 9: mod_base = OTHER; note = 2'-fluoro nucleotide
  modified_base 10: mod_base = OTHER; note = 2'-O-Methyl nucleotide
  modified_base 11: mod_base = OTHER; note = 2'-fluoro nucleotide
  modified_base 12: mod_base = OTHER; note = 2'-O-Methyl nucleotide
  modified_base 13: mod_base = OTHER; note = 2'-fluoro nucleotide
  modified_base 14: mod_base = OTHER; note = 2'-O-Methyl nucleotide
  modified_base 15: mod_base = OTHER; note = 2'-fluoro nucleotide
  modified_base 16: mod_base = OTHER; note = 2'-O-Methyl nucleotide
  modified_base 17: mod_base = OTHER; note = 2'-fluoro nucleotide
  modified_base 18: mod_base = OTHER; note = 2'-O-Methyl nucleotide
  modified_base 19: mod_base = OTHER; note = 2'-fluoro nucleotide
  modified_base 20: mod_base = OTHER; note = deoxy-thymine phosphorothioate
  misc_feature 1..19: note = RNA
  misc_feature 20..21: note = DNA
cttcttaaagaccatccagtt

SEQ ID NO: 1387 - DNA, 21 bp, synthetic construct
  misc_feature 1..21: note = Description of Artificial Sequence: Synthetic oligonucleotide
  source 1..21: mol_type = other DNA
  modified_base 1: mod_base = OTHER; note = 2'-fluoro nucleotide
  modified_base 2: mod_base = OTHER; note = 2'-fluoro nucleotide
  modified_base 3: mod_base = OTHER; note = 2'-O-Methyl nucleotide
  modified_base 4: mod_base = OTHER; note = 2'-fluoro nucleotide
  modified_base 5: mod_base = OTHER; note = 2'-O-Methyl nucleotide
  modified_base 6: mod_base = OTHER; note = 2'-fluoro nucleotide
  modified_base 7: mod_base = OTHER; note = 2'-O-Methyl nucleotide
  modified_base 8: mod_base = OTHER; note = 2'-fluoro nucleotide
  modified_base 9: mod_base = OTHER; note = 2'-O-Methyl nucleotide
  modified_base 10: mod_base = OTHER; note = 2'-fluoro nucleotide
  modified_base 11: mod_base = OTHER; note = 2'-O-Methyl nucleotide
  modified_base 12: mod_base = OTHER; note = 2'-fluoro nucleotide
  modified_base 13: mod_base = OTHER; note = 2'-O-Methyl nucleotide
  modified_base 14: mod_base = OTHER; note = 2'-fluoro nucleotide
  modified_base 15: mod_base = OTHER; note = 2'-O-Methyl nucleotide
  modified_base 16: mod_base = OTHER; note = 2'-fluoro nucleotide
  modified_base 17: mod_base = OTHER; note = 2'-O-Methyl nucleotide
  modified_base 18: mod_base = OTHER; note = 2'-fluoro nucleotide
  modified_base 19: mod_base = OTHER; note = 2'-O-Methyl nucleotide
  modified_base 20: mod_base = OTHER; note = deoxy-thymine phosphorothioate
  misc_feature 1..19: note = RNA
  misc_feature 20..21: note = DNA
ctggatggtctttaagaagtt

SEQ ID NO: 1388 - DNA, 21 bp, synthetic construct
  misc_feature 1..21: note = Description of Artificial Sequence: Synthetic oligonucleotide
  source 1..21: mol_type = other DNA
  modified_base 1: mod_base = OTHER; note = 2'-O-Methyl nucleotide
  modified_base 2: mod_base = OTHER; note = 2'-O-Methyl nucleotide
  modified_base 3: mod_base = OTHER; note = 2'-fluoro nucleotide
  modified_base 4: mod_base = OTHER; note = 2'-O-Methyl nucleotide
  modified_base 5: mod_base = OTHER; note = 2'-fluoro nucleotide
  modified_base 6: mod_base = OTHER; note = 2'-O-Methyl nucleotide
  modified_base 7: mod_base = OTHER; note = 2'-fluoro nucleotide
  modified_base 8: mod_base = OTHER; note = 2'-O-Methyl nucleotide
  modified_base 9: mod_base = OTHER; note = 2'-fluoro nucleotide
  modified_base 10: mod_base = OTHER; note = 2'-O-Methyl nucleotide
  modified_base 11: mod_base = OTHER; note = 2'-fluoro nucleotide
  modified_base 12: mod_base = OTHER; note = 2'-O-Methyl nucleotide
  modified_base 13: mod_base = OTHER; note = 2'-fluoro nucleotide
  modified_base 14: mod_base = OTHER; note = 2'-O-Methyl nucleotide
  modified_base 15: mod_base = OTHER; note = 2'-fluoro nucleotide
  modified_base 16: mod_base = OTHER; note = 2'-O-Methyl nucleotide
  modified_base 17: mod_base = OTHER; note = 2'-fluoro nucleotide
  modified_base 18: mod_base = OTHER; note = 2'-O-Methyl nucleotide
  modified_base 19: mod_base = OTHER; note = 2'-fluoro nucleotide
  modified_base 20: mod_base = OTHER; note = deoxy-thymine phosphorothioate
  misc_feature 1..19: note = RNA
  misc_feature 20..21: note = DNA
tcttaaagaccatccaggatt

SEQ ID NO: 1389 - DNA, 21 bp, synthetic construct
  misc_feature 1..21: note = Description of Artificial Sequence: Synthetic oligonucleotide
  source 1..21: mol_type = other DNA
  modified_base 1: mod_base = OTHER; note = 2'-fluoro nucleotide
  modified_base 2: mod_base = OTHER; note = 2'-fluoro nucleotide
  modified_base 3: mod_base = OTHER; note = 2'-O-Methyl nucleotide
  modified_base 4: mod_base = OTHER; note = 2'-fluoro nucleotide
  modified_base 5: mod_base = OTHER; note = 2'-O-Methyl nucleotide
  modified_base 6: mod_base = OTHER; note = 2'-fluoro nucleotide
  modified_base 7: mod_base = OTHER; note = 2'-O-Methyl nucleotide
  modified_base 8: mod_base = OTHER; note = 2'-fluoro nucleotide
  modified_base 9: mod_base = OTHER; note = 2'-O-Methyl nucleotide
  modified_base 10: mod_base = OTHER; note = 2'-fluoro nucleotide
  modified_base 11: mod_base = OTHER; note = 2'-O-Methyl nucleotide
  modified_base 12: mod_base = OTHER; note = 2'-fluoro nucleotide
  modified_base 13: mod_base = OTHER; note = 2'-O-Methyl nucleotide
  modified_base 14: mod_base = OTHER; note = 2'-fluoro nucleotide
  modified_base 15: mod_base = OTHER; note = 2'-O-Methyl nucleotide
  modified_base 16: mod_base = OTHER; note = 2'-fluoro nucleotide
  modified_base 17: mod_base = OTHER; note = 2'-O-Methyl nucleotide
  modified_base 18: mod_base = OTHER; note = 2'-fluoro nucleotide
  modified_base 19: mod_base = OTHER; note = 2'-O-Methyl nucleotide
  modified_base 20: mod_base = OTHER; note = deoxy-thymine phosphorothioate
  misc_feature 1..19: note = RNA
  misc_feature 20..21: note = DNA
tcctggatggtctttaagatt

SEQ ID NO: 1390 - DNA, 21 bp, synthetic construct
  misc_feature 1..21: note = Description of Artificial Sequence: Synthetic oligonucleotide
  source 1..21: mol_type = other DNA
  modified_base 1: mod_base = OTHER; note = 2'-O-Methyl nucleotide
  modified_base 2: mod_base = OTHER; note = 2'-O-Methyl nucleotide
  modified_base 3: mod_base = OTHER; note = 2'-fluoro nucleotide
  modified_base 4: mod_base = OTHER; note = 2'-O-Methyl nucleotide
  modified_base 5: mod_base = OTHER; note = 2'-fluoro nucleotide
  modified_base 6: mod_base = OTHER; note = 2'-O-Methyl nucleotide
  modified_base 7: mod_base = OTHER; note = 2'-fluoro nucleotide
  modified_base 8: mod_base = OTHER; note = 2'-O-Methyl nucleotide
  modified_base 9: mod_base = OTHER; note = 2'-fluoro nucleotide
  modified_base 10: mod_base = OTHER; note = 2'-O-Methyl nucleotide
  modified_base 11: mod_base = OTHER; note = 2'-fluoro nucleotide
  modified_base 12: mod_base = OTHER; note = 2'-O-Methyl nucleotide
  modified_base 13: mod_base = OTHER; note = 2'-fluoro nucleotide
  modified_base 14: mod_base = OTHER; note = 2'-O-Methyl nucleotide
  modified_base 15: mod_base = OTHER; note = 2'-fluoro nucleotide
  modified_base 16: mod_base = OTHER; note = 2'-O-Methyl nucleotide
  modified_base 17: mod_base = OTHER; note = 2'-fluoro nucleotide
  modified_base 18: mod_base = OTHER; note = 2'-O-Methyl nucleotide
  modified_base 19: mod_base = OTHER; note = 2'-fluoro nucleotide
  modified_base 20: mod_base = OTHER; note = deoxy-thymine phosphorothioate
  misc_feature 1..19: note = RNA
  misc_feature 20..21: note = DNA
ttaaagaccatccaggaggtt

SEQ ID NO: 1391 - DNA, 21 bp, synthetic construct
  misc_feature 1..21: note = Description of Artificial Sequence: Synthetic oligonucleotide
  source 1..21: mol_type = other DNA
  modified_base 1: mod_base = OTHER; note = 2'-fluoro nucleotide
  modified_base 2: mod_base = OTHER; note = 2'-fluoro nucleotide
  modified_base 3: mod_base = OTHER; note = 2'-O-Methyl nucleotide
  modified_base 4: mod_base = OTHER; note = 2'-fluoro nucleotide
  modified_base 5: mod_base = OTHER; note = 2'-O-Methyl nucleotide
  modified_base 6: mod_base = OTHER; note = 2'-fluoro nucleotide
  modified_base 7: mod_base = OTHER; note = 2'-O-Methyl nucleotide
  modified_base 8: mod_base = OTHER; note = 2'-fluoro nucleotide
  modified_base 9: mod_base = OTHER; note = 2'-O-Methyl nucleotide
  modified_base 10: mod_base = OTHER; note = 2'-fluoro nucleotide
  modified_base 11: mod_base = OTHER; note = 2'-O-Methyl nucleotide
  modified_base 12: mod_base = OTHER; note = 2'-fluoro nucleotide
  modified_base 13: mod_base = OTHER; note = 2'-O-Methyl nucleotide
  modified_base 14: mod_base = OTHER; note = 2'-fluoro nucleotide
  modified_base 15: mod_base = OTHER; note = 2'-O-Methyl nucleotide
  modified_base 16: mod_base = OTHER; note = 2'-fluoro nucleotide
  modified_base 17: mod_base = OTHER; note = 2'-O-Methyl nucleotide
  modified_base 18: mod_base = OTHER; note = 2'-fluoro nucleotide
  modified_base 19: mod_base = OTHER; note = 2'-O-Methyl nucleotide
  modified_base 20: mod_base = OTHER; note = deoxy-thymine phosphorothioate
  misc_feature 1..19: note = RNA
  misc_feature 20..21: note = DNA
cctcctggatggtctttaatt

SEQ ID NO: 1392 - DNA, 21 bp, synthetic construct
  misc_feature 1..21: note = Description of Artificial Sequence: Synthetic oligonucleotide
  source 1..21: mol_type = other DNA
  modified_base 1: mod_base = OTHER; note = 2'-O-Methyl nucleotide
  modified_base 2: mod_base = OTHER; note = 2'-O-Methyl nucleotide
  modified_base 3: mod_base = OTHER; note = 2'-fluoro nucleotide
  modified_base 4: mod_base = OTHER; note = 2'-O-Methyl nucleotide
  modified_base 5: mod_base = OTHER; note = 2'-fluoro nucleotide
  modified_base 6: mod_base = OTHER; note = 2'-O-Methyl nucleotide
  modified_base 7: mod_base = OTHER; note = 2'-fluoro nucleotide
  modified_base 8: mod_base = OTHER; note = 2'-O-Methyl nucleotide
  modified_base 9: mod_base = OTHER; note = 2'-fluoro nucleotide
  modified_base 10: mod_base = OTHER; note = 2'-O-Methyl nucleotide
  modified_base 11: mod_base = OTHER; note = 2'-fluoro nucleotide
  modified_base 12: mod_base = OTHER; note = 2'-O-Methyl nucleotide
  modified_base 13: mod_base = OTHER; note = 2'-fluoro nucleotide
  modified_base 14: mod_base = OTHER; note = 2'-O-Methyl nucleotide
  modified_base 15: mod_base = OTHER; note = 2'-fluoro nucleotide
  modified_base 16: mod_base = OTHER; note = 2'-O-Methyl nucleotide
  modified_base 17: mod_base = OTHER; note = 2'-fluoro nucleotide
  modified_base 18: mod_base = OTHER; note = 2'-O-Methyl nucleotide
  modified_base 19: mod_base = OTHER; note = 2'-fluoro nucleotide
  modified_base 20: mod_base = OTHER; note = deoxy-thymine phosphorothioate
  misc_feature 1..19: note = RNA
  misc_feature 20..21: note = DNA
taaagaccatccaggaggttt

SEQ ID NO: 1393 - DNA, 21 bp, synthetic construct
  misc_feature 1..21: note = Description of Artificial Sequence: Synthetic oligonucleotide
  source 1..21: mol_type = other DNA
  modified_base 1: mod_base = OTHER; note = 2'-fluoro nucleotide
  modified_base 2: mod_base = OTHER; note = 2'-fluoro nucleotide
  modified_base 3: mod_base = OTHER; note = 2'-O-Methyl nucleotide
  modified_base 4: mod_base = OTHER; note = 2'-fluoro nucleotide
  modified_base 5: mod_base = OTHER; note = 2'-O-Methyl nucleotide
  modified_base 6: mod_base = OTHER; note = 2'-fluoro nucleotide
  modified_base 7: mod_base = OTHER; note = 2'-O-Methyl nucleotide
  modified_base 8: mod_base = OTHER; note = 2'-fluoro nucleotide
  modified_base 9: mod_base = OTHER; note = 2'-O-Methyl nucleotide
  modified_base 10: mod_base = OTHER; note = 2'-fluoro nucleotide
  modified_base 11: mod_base = OTHER; note = 2'-O-Methyl nucleotide
  modified_base 12: mod_base = OTHER; note = 2'-fluoro nucleotide
  modified_base 13: mod_base = OTHER; note = 2'-O-Methyl nucleotide
  modified_base 14: mod_base = OTHER; note = 2'-fluoro nucleotide
  modified_base 15: mod_base = OTHER; note = 2'-O-Methyl nucleotide
  modified_base 16: mod_base = OTHER; note = 2'-fluoro nucleotide
  modified_base 17: mod_base = OTHER; note = 2'-O-Methyl nucleotide
  modified_base 18: mod_base = OTHER; note = 2'-fluoro nucleotide
  modified_base 19: mod_base = OTHER; note = 2'-O-Methyl nucleotide
  modified_base 20: mod_base = OTHER; note = deoxy-thymine phosphorothioate
  misc_feature 1..19: note = RNA
  misc_feature 20..21: note = DNA
acctcctggatggtctttatt

SEQ ID NO: 1394 - DNA, 21 bp, synthetic construct
  misc_feature 1..21: note = Description of Artificial Sequence: Synthetic oligonucleotide
  source 1..21: mol_type = other DNA
  modified_base 1: mod_base = OTHER; note = 2'-O-Methyl nucleotide
  modified_base 2: mod_base = OTHER; note = 2'-O-Methyl nucleotide
  modified_base 3: mod_base = OTHER; note = 2'-fluoro nucleotide
  modified_base 4: mod_base = OTHER; note = 2'-O-Methyl nucleotide
  modified_base 5: mod_base = OTHER; note = 2'-fluoro nucleotide
  modified_base 6: mod_base = OTHER; note = 2'-O-Methyl nucleotide
  modified_base 7: mod_base = OTHER; note = 2'-fluoro nucleotide
  modified_base 8: mod_base = OTHER; note = 2'-O-Methyl nucleotide
  modified_base 9: mod_base = OTHER; note = 2'-fluoro nucleotide
  modified_base 10: mod_base = OTHER; note = 2'-O-Methyl nucleotide
  modified_base 11: mod_base = OTHER; note = 2'-fluoro nucleotide
  modified_base 12: mod_base = OTHER; note = 2'-O-Methyl nucleotide
  modified_base 13: mod_base = OTHER; note = 2'-fluoro nucleotide
  modified_base 14: mod_base = OTHER; note = 2'-O-Methyl nucleotide
  modified_base 15: mod_base = OTHER; note = 2'-fluoro nucleotide
  modified_base 16: mod_base = OTHER; note = 2'-O-Methyl nucleotide
  modified_base 17: mod_base = OTHER; note = 2'-fluoro nucleotide
  modified_base 18: mod_base = OTHER; note = 2'-O-Methyl nucleotide
  modified_base 19: mod_base = OTHER; note = 2'-fluoro nucleotide
  modified_base 20: mod_base = OTHER; note = deoxy-thymine phosphorothioate
  misc_feature 1..19: note = RNA
  misc_feature 20..21: note = DNA
ccaggaggtggctggttattt

SEQ ID NO: 1395 - DNA, 21 bp, synthetic construct
  misc_feature 1..21: note = Description of Artificial Sequence: Synthetic oligonucleotide
  source 1..21: mol_type = other DNA
  modified_base 1: mod_base = OTHER; note = 2'-fluoro nucleotide
  modified_base 2: mod_base = OTHER; note = 2'-fluoro nucleotide
  modified_base 3: mod_base = OTHER; note = 2'-O-Methyl nucleotide
  modified_base 4: mod_base = OTHER; note = 2'-fluoro nucleotide
  modified_base 5: mod_base = OTHER; note = 2'-O-Methyl nucleotide
  modified_base 6: mod_base = OTHER; note = 2'-fluoro nucleotide
  modified_base 7: mod_base = OTHER; note = 2'-O-Methyl nucleotide
  modified_base 8: mod_base = OTHER; note = 2'-fluoro nucleotide
  modified_base 9: mod_base = OTHER; note = 2'-O-Methyl nucleotide
  modified_base 10: mod_base = OTHER; note = 2'-fluoro nucleotide
  modified_base 11: mod_base = OTHER; note = 2'-O-Methyl nucleotide
  modified_base 12: mod_base = OTHER; note = 2'-fluoro nucleotide
  modified_base 13: mod_base = OTHER; note = 2'-O-Methyl nucleotide
  modified_base 14: mod_base = OTHER; note = 2'-fluoro nucleotide
  modified_base 15: mod_base = OTHER; note = 2'-O-Methyl nucleotide
  modified_base 16: mod_base = OTHER; note = 2'-fluoro nucleotide
  modified_base 17: mod_base = OTHER; note = 2'-O-Methyl nucleotide
  modified_base 18: mod_base = OTHER; note = 2'-fluoro nucleotide
  modified_base 19: mod_base = OTHER; note = 2'-O-Methyl nucleotide
  modified_base 20: mod_base = OTHER; note = deoxy-thymine phosphorothioate
  misc_feature 1..19: note = RNA
  misc_feature 20..21: note = DNA
ataaccagccacctcctggtt

SEQ ID NO: 1396 - DNA, 21 bp, synthetic construct
  misc_feature 1..21: note = Description of Artificial Sequence: Synthetic oligonucleotide
  source 1..21: mol_type = other DNA
  modified_base 1: mod_base = OTHER; note = 2'-O-Methyl nucleotide
  modified_base 2: mod_base = OTHER; note = 2'-O-Methyl nucleotide
  modified_base 3: mod_base = OTHER; note = 2'-fluoro nucleotide
  modified_base 4: mod_base = OTHER; note = 2'-O-Methyl nucleotide
  modified_base 5: mod_base = OTHER; note = 2'-fluoro nucleotide
  modified_base 6: mod_base = OTHER; note = 2'-O-Methyl nucleotide
  modified_base 7: mod_base = OTHER; note = 2'-fluoro nucleotide
  modified_base 8: mod_base = OTHER; note = 2'-O-Methyl nucleotide
  modified_base 9: mod_base = OTHER; note = 2'-fluoro nucleotide
  modified_base 10: mod_base = OTHER; note = 2'-O-Methyl nucleotide
  modified_base 11: mod_base = OTHER; note = 2'-fluoro nucleotide
  modified_base 12: mod_base = OTHER; note = 2'-O-Methyl nucleotide
  modified_base 13: mod_base = OTHER; note = 2'-fluoro nucleotide
  modified_base 14: mod_base = OTHER; note = 2'-O-Methyl nucleotide
  modified_base 15: mod_base = OTHER; note = 2'-fluoro nucleotide
  modified_base 16: mod_base = OTHER; note = 2'-O-Methyl nucleotide
  modified_base 17: mod_base = OTHER; note = 2'-fluoro nucleotide
  modified_base 18: mod_base = OTHER; note = 2'-O-Methyl nucleotide
  modified_base 19: mod_base = OTHER; note = 2'-fluoro nucleotide
  modified_base 20: mod_base = OTHER; note = deoxy-thymine phosphorothioate
  misc_feature 1..19: note = RNA
  misc_feature 20..21: note = DNA
caggaggtggctggttatgtt

SEQ ID NO: 1397 - DNA, 21 bp, synthetic construct
  misc_feature 1..21: note = Description of Artificial Sequence: Synthetic oligonucleotide
  source 1..21: mol_type = other DNA
  modified_base 1: mod_base = OTHER; note = 2'-fluoro nucleotide
  modified_base 2: mod_base = OTHER; note = 2'-fluoro nucleotide
  modified_base 3: mod_base = OTHER; note = 2'-O-Methyl nucleotide
  modified_base 4: mod_base = OTHER; note = 2'-fluoro nucleotide
  modified_base 5: mod_base = OTHER; note = 2'-O-Methyl nucleotide
  modified_base 6: mod_base = OTHER; note = 2'-fluoro nucleotide
  modified_base 7: mod_base = OTHER; note = 2'-O-Methyl nucleotide
  modified_base 8: mod_base = OTHER; note = 2'-fluoro nucleotide
  modified_base 9: mod_base = OTHER; note = 2'-O-Methyl nucleotide
  modified_base 10: mod_base = OTHER; note = 2'-fluoro nucleotide
  modified_base 11: mod_base = OTHER; note = 2'-O-Methyl nucleotide
  modified_base 12: mod_base = OTHER; note = 2'-fluoro nucleotide
  modified_base 13: mod_base = OTHER; note = 2'-O-Methyl nucleotide
  modified_base 14: mod_base = OTHER; note = 2'-fluoro nucleotide
  modified_base 15: mod_base = OTHER; note = 2'-O-Methyl nucleotide
  modified_base 16: mod_base = OTHER; note = 2'-fluoro nucleotide
  modified_base 17: mod_base = OTHER; note = 2'-O-Methyl nucleotide
  modified_base 18: mod_base = OTHER; note = 2'-fluoro nucleotide
  modified_base 19: mod_base = OTHER; note = 2'-O-Methyl nucleotide
  modified_base 20: mod_base = OTHER; note = deoxy-thymine phosphorothioate
  misc_feature 1..19: note = RNA
  misc_feature 20..21: note = DNA
cataaccagccacctcctgtt

SEQ ID NO: 1398 - DNA, 21 bp, synthetic construct
  misc_feature 1..21: note = Description of Artificial Sequence: Synthetic oligonucleotide
  source 1..21: mol_type = other DNA
  modified_base 1: mod_base = OTHER; note = 2'-O-Methyl nucleotide
  modified_base 2: mod_base = OTHER; note = 2'-O-Methyl nucleotide
  modified_base 3: mod_base = OTHER; note = 2'-fluoro nucleotide
  modified_base 4: mod_base = OTHER; note = 2'-O-Methyl nucleotide
  modified_base 5: mod_base = OTHER; note = 2'-fluoro nucleotide
  modified_base 6: mod_base = OTHER; note = 2'-O-Methyl nucleotide
  modified_base 7: mod_base = OTHER; note = 2'-fluoro nucleotide
  modified_base 8: mod_base = OTHER; note = 2'-O-Methyl nucleotide
  modified_base 9: mod_base = OTHER; note = 2'-fluoro nucleotide
  modified_base 10: mod_base = OTHER; note = 2'-O-Methyl nucleotide
  modified_base 11: mod_base = OTHER; note = 2'-fluoro nucleotide
  modified_base 12: mod_base = OTHER; note = 2'-O-Methyl nucleotide
  modified_base 13: mod_base = OTHER; note = 2'-fluoro nucleotide
  modified_base 14: mod_base = OTHER; note = 2'-O-Methyl nucleotide
  modified_base 15: mod_base = OTHER; note = 2'-fluoro nucleotide
  modified_base 16: mod_base = OTHER; note = 2'-O-Methyl nucleotide
  modified_base 17: mod_base = OTHER; note = 2'-fluoro nucleotide
  modified_base 18: mod_base = OTHER; note = 2'-O-Methyl nucleotide
  modified_base 19: mod_base = OTHER; note = 2'-fluoro nucleotide
  modified_base 20: mod_base = OTHER; note = deoxy-thymine phosphorothioate
  misc_feature 1..19: note = RNA
  misc_feature 20..21: note = DNA
aggaggtggctggttatgttt

SEQ ID NO: 1399 - DNA, 21 bp, synthetic construct
  misc_feature 1..21: note = Description of Artificial Sequence: Synthetic oligonucleotide
  source 1..21: mol_type = other DNA
  modified_base 1: mod_base = OTHER; note = 2'-fluoro nucleotide
  modified_base 2: mod_base = OTHER; note = 2'-fluoro nucleotide
  modified_base 3: mod_base = OTHER; note = 2'-O-Methyl nucleotide
  modified_base 4: mod_base = OTHER; note = 2'-fluoro nucleotide
  modified_base 5: mod_base = OTHER; note = 2'-O-Methyl nucleotide
  modified_base 6: mod_base = OTHER; note = 2'-fluoro nucleotide
  modified_base 7: mod_base = OTHER; note = 2'-O-Methyl nucleotide
  modified_base 8: mod_base = OTHER; note = 2'-fluoro nucleotide
  modified_base 9: mod_base = OTHER; note = 2'-O-Methyl nucleotide
  modified_base 10: mod_base = OTHER; note = 2'-fluoro nucleotide
  modified_base 11: mod_base = OTHER; note = 2'-O-Methyl nucleotide
  modified_base 12: mod_base = OTHER; note = 2'-fluoro nucleotide
  modified_base 13: mod_base = OTHER; note = 2'-O-Methyl nucleotide
  modified_base 14: mod_base = OTHER; note = 2'-fluoro nucleotide
  modified_base 15: mod_base = OTHER; note = 2'-O-Methyl nucleotide
  modified_base 16: mod_base = OTHER; note = 2'-fluoro nucleotide
  modified_base 17: mod_base = OTHER; note = 2'-O-Methyl nucleotide
  modified_base 18: mod_base = OTHER; note = 2'-fluoro nucleotide
  modified_base 19: mod_base = OTHER; note = 2'-O-Methyl nucleotide
  modified_base 20: mod_base = OTHER; note = deoxy-thymine phosphorothioate
  misc_feature 1..19: note = RNA
  misc_feature 20..21: note = DNA
acataaccagccacctccttt

SEQ ID NO: 1400 - DNA, 21 bp, synthetic construct
  misc_feature 1..21: note = Description of Artificial Sequence: Synthetic oligonucleotide
  source 1..21: mol_type = other DNA
  modified_base 1: mod_base = OTHER; note = 2'-O-Methyl nucleotide
  modified_base 2: mod_base = OTHER; note = 2'-O-Methyl nucleotide
  modified_base 3: mod_base = OTHER; note = 2'-fluoro nucleotide
  modified_base 4: mod_base = OTHER; note = 2'-O-Methyl nucleotide
  modified_base 5: mod_base = OTHER; note = 2'-fluoro nucleotide
  modified_base 6: mod_base = OTHER; note = 2'-O-Methyl nucleotide
  modified_base 7: mod_base = OTHER; note = 2'-fluoro nucleotide
  modified_base 8: mod_base = OTHER; note = 2'-O-Methyl nucleotide
  modified_base 9: mod_base = OTHER; note = 2'-fluoro nucleotide
  modified_base 10: mod_base = OTHER; note = 2'-O-Methyl nucleotide
  modified_base 11: mod_base = OTHER; note = 2'-fluoro nucleotide
  modified_base 12: mod_base = OTHER; note = 2'-O-Methyl nucleotide
  modified_base 13: mod_base = OTHER; note = 2'-fluoro nucleotide
  modified_base 14: mod_base = OTHER; note = 2'-O-Methyl nucleotide
  modified_base 15: mod_base = OTHER; note = 2'-fluoro nucleotide
  modified_base 16: mod_base = OTHER; note = 2'-O-Methyl nucleotide
  modified_base 17: mod_base = OTHER; note = 2'-fluoro nucleotide
  modified_base 18: mod_base = OTHER; note = 2'-O-Methyl nucleotide
  modified_base 19: mod_base = OTHER; note = 2'-fluoro nucleotide
  modified_base 20: mod_base = OTHER; note = deoxy-thymine phosphorothioate
  misc_feature 1..19: note = RNA
  misc_feature 20..21: note = DNA
ggaggtggctggttatgtctt

SEQ ID NO: 1401 - DNA, 21 bp, synthetic construct
  misc_feature 1..21: note = Description of Artificial Sequence: Synthetic oligonucleotide
  source 1..21: mol_type = other DNA
  modified_base 1: mod_base = OTHER; note = 2'-fluoro nucleotide
  modified_base 2: mod_base = OTHER; note = 2'-fluoro nucleotide
  modified_base 3: mod_base = OTHER; note = 2'-O-Methyl nucleotide
  modified_base 4: mod_base = OTHER; note = 2'-fluoro nucleotide
  modified_base 5: mod_base = OTHER; note = 2'-O-Methyl nucleotide
  modified_base 6: mod_base = OTHER; note = 2'-fluoro nucleotide
  modified_base 7: mod_base = OTHER; note = 2'-O-Methyl nucleotide
  modified_base 8: mod_base = OTHER; note = 2'-fluoro nucleotide
  modified_base 9: mod_base = OTHER; note = 2'-O-Methyl nucleotide
  modified_base 10: mod_base = OTHER; note = 2'-fluoro nucleotide
  modified_base 11: mod_base = OTHER; note = 2'-O-Methyl nucleotide
  modified_base 12: mod_base = OTHER; note = 2'-fluoro nucleotide
  modified_base 13: mod_base = OTHER; note = 2'-O-Methyl nucleotide
  modified_base 14: mod_base = OTHER; note = 2'-fluoro nucleotide
  modified_base 15: mod_base = OTHER; note = 2'-O-Methyl nucleotide
  modified_base 16: mod_base = OTHER; note = 2'-fluoro nucleotide
  modified_base 17: mod_base = OTHER; note = 2'-O-Methyl nucleotide
  modified_base 18: mod_base = OTHER; note = 2'-fluoro nucleotide
  modified_base 19: mod_base = OTHER; note = 2'-O-Methyl nucleotide
  modified_base 20: mod_base = OTHER; note = deoxy-thymine phosphorothioate
  misc_feature 1..19: note = RNA
  misc_feature 20..21: note = DNA
gacataaccagccacctcctt

SEQ ID NO: 1402 - DNA, 21 bp, synthetic construct
  misc_feature 1..21: note = Description of Artificial Sequence: Synthetic oligonucleotide
  source 1..21: mol_type = other DNA
  modified_base 1: mod_base = OTHER; note = 2'-O-Methyl nucleotide
  modified_base 2: mod_base = OTHER; note = 2'-O-Methyl nucleotide
  modified_base 3: mod_base = OTHER; note = 2'-fluoro nucleotide
  modified_base 4: mod_base = OTHER; note = 2'-O-Methyl nucleotide
  modified_base 5: mod_base = OTHER; note = 2'-fluoro nucleotide
  modified_base 6: mod_base = OTHER; note = 2'-O-Methyl nucleotide
  modified_base 7: mod_base = OTHER; note = 2'-fluoro nucleotide
  modified_base 8: mod_base = OTHER; note = 2'-O-Methyl nucleotide
  modified_base 9: mod_base = OTHER; note = 2'-fluoro nucleotide
  modified_base 10: mod_base = OTHER; note = 2'-O-Methyl nucleotide
  modified_base 11: mod_base = OTHER; note = 2'-fluoro nucleotide
  modified_base 12: mod_base = OTHER; note = 2'-O-Methyl nucleotide
  modified_base 13: mod_base = OTHER; note = 2'-fluoro nucleotide
  modified_base 14: mod_base = OTHER; note = 2'-O-Methyl nucleotide
  modified_base 15: mod_base = OTHER; note = 2'-fluoro nucleotide
  modified_base 16: mod_base = OTHER; note = 2'-O-Methyl nucleotide
  modified_base 17: mod_base = OTHER; note = 2'-fluoro nucleotide
  modified_base 18: mod_base = OTHER; note = 2'-O-Methyl nucleotide
  modified_base 19: mod_base = OTHER; note = 2'-fluoro nucleotide
  modified_base 20: mod_base = OTHER; note = deoxy-thymine phosphorothioate
  misc_feature 1..19: note = RNA
  misc_feature 20..21: note = DNA
gaggtggctggttatgtcctt

SEQ ID NO: 1403 - DNA, 21 bp, synthetic construct
  misc_feature 1..21: note = Description of Artificial Sequence: Synthetic oligonucleotide
  source 1..21: mol_type = other DNA
  modified_base 1: mod_base = OTHER; note = 2'-fluoro nucleotide
  modified_base 2: mod_base = OTHER; note = 2'-fluoro nucleotide
  modified_base 3: mod_base = OTHER; note = 2'-O-Methyl nucleotide
  modified_base 4: mod_base = OTHER; note = 2'-fluoro nucleotide
  modified_base 5: mod_base = OTHER; note = 2'-O-Methyl nucleotide
  modified_base 6: mod_base = OTHER; note = 2'-fluoro nucleotide
  modified_base 7: mod_base = OTHER; note = 2'-O-Methyl nucleotide
  modified_base 8: mod_base = OTHER; note = 2'-fluoro nucleotide
  modified_base 9: mod_base = OTHER; note = 2'-O-Methyl nucleotide
  modified_base 10: mod_base = OTHER; note = 2'-fluoro nucleotide
  modified_base 11: mod_base = OTHER; note = 2'-O-Methyl nucleotide
  modified_base 12: mod_base = OTHER; note = 2'-fluoro nucleotide
  modified_base 13: mod_base = OTHER; note = 2'-O-Methyl nucleotide
  modified_base 14: mod_base = OTHER; note = 2'-fluoro nucleotide
  modified_base 15: mod_base = OTHER; note = 2'-O-Methyl nucleotide
  modified_base 16: mod_base = OTHER; note = 2'-fluoro nucleotide
  modified_base 17: mod_base = OTHER; note = 2'-O-Methyl nucleotide
  modified_base 18: mod_base = OTHER; note = 2'-fluoro nucleotide
  modified_base 19: mod_base = OTHER; note = 2'-O-Methyl nucleotide
  modified_base 20: mod_base = OTHER; note = deoxy-thymine phosphorothioate
  misc_feature 1..19: note = RNA
  misc_feature 20..21: note = DNA
ggacataaccagccacctctt

SEQ ID NO: 1404 - DNA, 21 bp, synthetic construct
  misc_feature 1..21: note = Description of Artificial Sequence: Synthetic oligonucleotide
  source 1..21: mol_type = other DNA
  modified_base 1: mod_base = OTHER; note = 2'-O-Methyl nucleotide
  modified_base 2: mod_base = OTHER; note = 2'-O-Methyl nucleotide
  modified_base 3: mod_base = OTHER; note = 2'-fluoro nucleotide
  modified_base 4: mod_base = OTHER; note = 2'-O-Methyl nucleotide
  modified_base 5: mod_base = OTHER; note = 2'-fluoro nucleotide
  modified_base 6: mod_base = OTHER; note = 2'-O-Methyl nucleotide
  modified_base 7: mod_base = OTHER; note = 2'-fluoro nucleotide
  modified_base 8: mod_base = OTHER; note = 2'-O-Methyl nucleotide
  modified_base 9: mod_base = OTHER; note = 2'-fluoro nucleotide
  modified_base 10: mod_base = OTHER; note = 2'-O-Methyl nucleotide
  modified_base 11: mod_base = OTHER; note = 2'-fluoro nucleotide
  modified_base 12: mod_base = OTHER; note = 2'-O-Methyl nucleotide
  modified_base 13: mod_base = OTHER; note = 2'-fluoro nucleotide
  modified_base 14: mod_base = OTHER; note = 2'-O-Methyl nucleotide
  modified_base 15: mod_base = OTHER; note = 2'-fluoro nucleotide
  modified_base 16: mod_base = OTHER; note = 2'-O-Methyl nucleotide
  modified_base 17: mod_base = OTHER; note = 2'-fluoro nucleotide
  modified_base 18: mod_base = OTHER; note = 2'-O-Methyl nucleotide
  modified_base 19: mod_base = OTHER; note = 2'-fluoro nucleotide
  modified_base 20: mod_base = OTHER; note = deoxy-thymine phosphorothioate
  misc_feature 1..19: note = RNA
  misc_feature 20..21: note = DNA
aggtggctggttatgtccttt

SEQ ID NO: 1405 - DNA, 21 bp, synthetic construct
  misc_feature 1..21: note = Description of Artificial Sequence: Synthetic oligonucleotide
  source 1..21: mol_type = other DNA
  modified_base 1: mod_base = OTHER; note = 2'-fluoro nucleotide
  modified_base 2: mod_base = OTHER; note = 2'-fluoro nucleotide
  modified_base 3: mod_base = OTHER; note = 2'-O-Methyl nucleotide
  modified_base 4: mod_base = OTHER; note = 2'-fluoro nucleotide
  modified_base 5: mod_base = OTHER; note = 2'-O-Methyl nucleotide
  modified_base 6: mod_base = OTHER; note = 2'-fluoro nucleotide
  modified_base 7: mod_base = OTHER; note = 2'-O-Methyl nucleotide
  modified_base 8: mod_base = OTHER; note = 2'-fluoro nucleotide
  modified_base 9: mod_base = OTHER; note = 2'-O-Methyl nucleotide
  modified_base 10: mod_base = OTHER; note = 2'-fluoro nucleotide
  modified_base 11: mod_base = OTHER; note = 2'-O-Methyl nucleotide
  modified_base 12: mod_base = OTHER; note = 2'-fluoro nucleotide
  modified_base 13: mod_base = OTHER; note = 2'-O-Methyl nucleotide
  modified_base 14: mod_base = OTHER; note = 2'-fluoro nucleotide
  modified_base 15: mod_base = OTHER; note = 2'-O-Methyl nucleotide
  modified_base 16: mod_base = OTHER; note = 2'-fluoro nucleotide
  modified_base 17: mod_base = OTHER; note = 2'-O-Methyl nucleotide
  modified_base 18: mod_base = OTHER; note = 2'-fluoro nucleotide
  modified_base 19: mod_base = OTHER; note = 2'-O-Methyl nucleotide
  modified_base 20: mod_base = OTHER; note = deoxy-thymine phosphorothioate
  misc_feature 1..19: note = RNA
  misc_feature 20..21: note = DNA
aggacataaccagccaccttt

SEQ ID NO: 1406 - DNA, 21 bp, synthetic construct
  misc_feature 1..21: note = Description of Artificial Sequence: Synthetic oligonucleotide
  source 1..21: mol_type = other DNA
  modified_base 1: mod_base = OTHER; note = 2'-O-Methyl nucleotide
  modified_base 2: mod_base = OTHER; note = 2'-O-Methyl nucleotide
  modified_base 3: mod_base = OTHER; note = 2'-fluoro nucleotide
  modified_base 4: mod_base = OTHER; note = 2'-O-Methyl nucleotide
  modified_base 5: mod_base = OTHER; note = 2'-fluoro nucleotide
  modified_base 6: mod_base = OTHER; note = 2'-O-Methyl nucleotide
  modified_base 7: mod_base = OTHER; note = 2'-fluoro nucleotide
  modified_base 8: mod_base = OTHER; note = 2'-O-Methyl nucleotide
  modified_base 9: mod_base = OTHER; note = 2'-fluoro nucleotide
  modified_base 10: mod_base = OTHER; note = 2'-O-Methyl nucleotide
  modified_base 11: mod_base = OTHER; note = 2'-fluoro nucleotide
  modified_base 12: mod_base = OTHER; note = 2'-O-Methyl nucleotide
  modified_base 13: mod_base = OTHER; note = 2'-fluoro nucleotide
  modified_base 14: mod_base = OTHER; note = 2'-O-Methyl nucleotide
  modified_base 15: mod_base = OTHER; note = 2'-fluoro nucleotide
  modified_base 16: mod_base = OTHER; note = 2'-O-Methyl nucleotide
  modified_base 17: mod_base = OTHER; note = 2'-fluoro nucleotide
  modified_base 18: mod_base = OTHER; note = 2'-O-Methyl nucleotide
  modified_base 19: mod_base = OTHER; note = 2'-fluoro nucleotide
  modified_base 20: mod_base = OTHER; note = deoxy-thymine phosphorothioate
  misc_feature 1..19: note = RNA
  misc_feature 20..21: note = DNA
gtggctggttatgtcctcatt

SEQ ID NO: 1407 - DNA, 21 bp, synthetic construct
  misc_feature 1..21: note = Description of Artificial Sequence: Synthetic oligonucleotide
  source 1..21: mol_type = other DNA
  modified_base 1: mod_base = OTHER; note = 2'-fluoro nucleotide
  modified_base 2: mod_base = OTHER; note = 2'-fluoro nucleotide
  modified_base 3: mod_base = OTHER; note = 2'-O-Methyl nucleotide
  modified_base 4: mod_base = OTHER; note = 2'-fluoro nucleotide
  modified_base 5: mod_base = OTHER; note = 2'-O-Methyl nucleotide
  modified_base 6: mod_base = OTHER; note = 2'-fluoro nucleotide
  modified_base 7: mod_base = OTHER; note = 2'-O-Methyl nucleotide
  modified_base 8: mod_base = OTHER; note = 2'-fluoro nucleotide
  modified_base 9: mod_base = OTHER; note = 2'-O-Methyl nucleotide
  modified_base 10: mod_base = OTHER; note = 2'-fluoro nucleotide
  modified_base 11: mod_base = OTHER; note = 2'-O-Methyl nucleotide
  modified_base 12: mod_base = OTHER; note = 2'-fluoro nucleotide
  modified_base 13: mod_base = OTHER; note = 2'-O-Methyl nucleotide
  modified_base 14: mod_base = OTHER; note = 2'-fluoro nucleotide
  modified_base 15: mod_base = OTHER; note = 2'-O-Methyl nucleotide
  modified_base 16: mod_base = OTHER; note = 2'-fluoro nucleotide
  modified_base 17: mod_base = OTHER; note = 2'-O-Methyl nucleotide
  modified_base 18: mod_base = OTHER; note = 2'-fluoro nucleotide
  modified_base 19: mod_base = OTHER; note = 2'-O-Methyl nucleotide
  modified_base 20: mod_base = OTHER; note = deoxy-thymine phosphorothioate
  misc_feature 1..19: note = RNA
  misc_feature 20..21: note = DNA
tgaggacataaccagccactt

SEQ ID NO: 1408 - DNA, 21 bp, synthetic construct
  misc_feature 1..21: note = Description of Artificial Sequence: Synthetic oligonucleotide
  source 1..21: mol_type = other DNA
  modified_base 1: mod_base = OTHER; note = 2'-O-Methyl nucleotide
  modified_base 2: mod_base = OTHER; note = 2'-O-Methyl nucleotide
  modified_base 3: mod_base = OTHER; note = 2'-fluoro nucleotide
  modified_base 4: mod_base = OTHER; note = 2'-O-Methyl nucleotide
  modified_base 5: mod_base = OTHER; note = 2'-fluoro nucleotide
  modified_base 6: mod_base = OTHER; note = 2'-O-Methyl nucleotide
  modified_base 7: mod_base = OTHER; note = 2'-fluoro nucleotide
  modified_base 8: mod_base = OTHER; note = 2'-O-Methyl nucleotide
  modified_base 9: mod_base = OTHER; note = 2'-fluoro nucleotide
  modified_base 10: mod_base = OTHER; note = 2'-O-Methyl nucleotide
  modified_base 11: mod_base = OTHER; note = 2'-fluoro nucleotide
  modified_base 12: mod_base = OTHER; note = 2'-O-Methyl nucleotide
  modified_base 13: mod_base = OTHER; note = 2'-fluoro nucleotide
  modified_base 14: mod_base = OTHER; note = 2'-O-Methyl nucleotide
  modified_base 15: mod_base = OTHER; note = 2'-fluoro nucleotide
  modified_base 16: mod_base = OTHER; note = 2'-O-Methyl nucleotide
  modified_base 17: mod_base = OTHER; note = 2'-fluoro nucleotide
  modified_base 18: mod_base = OTHER; note = 2'-O-Methyl nucleotide
  modified_base 19: mod_base = OTHER; note = 2'-fluoro nucleotide
  modified_base 20: mod_base = OTHER; note = deoxy-thymine phosphorothioate
  misc_feature 1..19: note = RNA
  misc_feature 20..21: note = DNA
gccctcaacacagtggagctt

SEQ ID NO: 1409 - DNA, 21 bp, synthetic construct
  misc_feature 1..21: note = Description of Artificial Sequence: Synthetic oligonucleotide
  source 1..21: mol_type = other DNA
  modified_base 1: mod_base = OTHER; note = 2'-fluoro nucleotide
  modified_base 2: mod_base = OTHER; note = 2'-fluoro nucleotide
  modified_base 3: mod_base = OTHER; note = 2'-O-Methyl nucleotide
  modified_base 4: mod_base = OTHER; note = 2'-fluoro nucleotide
  modified_base 5: mod_base = OTHER; note = 2'-O-Methyl nucleotide
  modified_base 6: mod_base = OTHER; note = 2'-fluoro nucleotide
  modified_base 7: mod_base = OTHER; note = 2'-O-Methyl nucleotide
  modified_base 8: mod_base = OTHER; note = 2'-fluoro nucleotide
  modified_base 9: mod_base = OTHER; note = 2'-O-Methyl nucleotide
  modified_base 10: mod_base = OTHER; note = 2'-fluoro nucleotide
  modified_base 11: mod_base = OTHER; note = 2'-O-Methyl nucleotide
  modified_base 12: mod_base = OTHER; note = 2'-fluoro nucleotide
  modified_base 13: mod_base = OTHER; note = 2'-O-Methyl nucleotide
  modified_base 14: mod_base = OTHER; note = 2'-fluoro nucleotide
  modified_base 15: mod_base = OTHER; note = 2'-O-Methyl nucleotide
  modified_base 16: mod_base = OTHER; note = 2'-fluoro nucleotide
  modified_base 17: mod_base = OTHER; note = 2'-O-Methyl nucleotide
  modified_base 18: mod_base = OTHER; note = 2'-fluoro nucleotide
  modified_base 19: mod_base = OTHER; note = 2'-O-Methyl nucleotide
  modified_base 20: mod_base = OTHER; note = deoxy-thymine phosphorothioate
  misc_feature 1..19: note = RNA
  misc_feature 20..21: note = DNA
gctccactgtgttgagggctt

SEQ ID NO: 1410 - DNA, 21 bp, synthetic construct
  misc_feature 1..21: note = Description of Artificial Sequence: Synthetic oligonucleotide
  source 1..21: mol_type = other DNA
  modified_base 1: mod_base = OTHER; note = 2'-O-Methyl nucleotide
  modified_base 2: mod_base = OTHER; note = 2'-O-Methyl nucleotide
  modified_base 3: mod_base = OTHER; note = 2'-fluoro nucleotide
  modified_base 4: mod_base = OTHER; note = 2'-O-Methyl nucleotide
  modified_base 5: mod_base = OTHER; note = 2'-fluoro nucleotide
  modified_base 6: mod_base = OTHER; note = 2'-O-Methyl nucleotide
  modified_base 7: mod_base = OTHER; note = 2'-fluoro nucleotide
  modified_base 8: mod_base = OTHER; note = 2'-O-Methyl nucleotide
  modified_base 9: mod_base = OTHER; note = 2'-fluoro nucleotide
  modified_base 10: mod_base = OTHER; note = 2'-O-Methyl nucleotide
  modified_base 11: mod_base = OTHER; note = 2'-fluoro nucleotide
  modified_base 12: mod_base = OTHER; note = 2'-O-Methyl nucleotide
  modified_base 13: mod_base = OTHER; note = 2'-fluoro nucleotide
  modified_base 14: mod_base = OTHER; note = 2'-O-Methyl nucleotide
  modified_base 15: mod_base = OTHER; note = 2'-fluoro nucleotide
  modified_base 16: mod_base = OTHER; note = 2'-O-Methyl nucleotide
  modified_base 17: mod_base = OTHER; note = 2'-fluoro nucleotide
  modified_base 18: mod_base = OTHER; note = 2'-O-Methyl nucleotide
  modified_base 19: mod_base = OTHER; note = 2'-fluoro nucleotide
  modified_base 20: mod_base = OTHER; note = deoxy-thymine phosphorothioate
  misc_feature 1..19: note = RNA
  misc_feature 20..21: note = DNA
ttcctttggaaaacctgcatt

SEQ ID NO: 1411 - DNA, 21 bp, synthetic construct
  misc_feature 1..21: note = Description of Artificial Sequence: Synthetic oligonucleotide
  source 1..21: mol_type = other DNA
  modified_base 1: mod_base = OTHER; note = 2'-fluoro nucleotide
  modified_base 2: mod_base = OTHER; note = 2'-fluoro nucleotide
  modified_base 3: mod_base = OTHER; note = 2'-O-Methyl nucleotide
  modified_base 4: mod_base = OTHER; note = 2'-fluoro nucleotide
  modified_base 5: mod_base = OTHER; note = 2'-O-Methyl nucleotide
  modified_base 6: mod_base = OTHER; note = 2'-fluoro nucleotide
  modified_base 7: mod_base = OTHER; note = 2'-O-Methyl nucleotide
  modified_base 8: mod_base = OTHER; note = 2'-fluoro nucleotide
  modified_base 9: mod_base = OTHER; note = 2'-O-Methyl nucleotide
  modified_base 10: mod_base = OTHER; note = 2'-fluoro nucleotide
  modified_base 11: mod_base = OTHER; note = 2'-O-Methyl nucleotide
  modified_base 12: mod_base = OTHER; note = 2'-fluoro nucleotide
  modified_base 13: mod_base = OTHER; note = 2'-O-Methyl nucleotide
  modified_base 14: mod_base = OTHER; note = 2'-fluoro nucleotide
  modified_base 15: mod_base = OTHER; note = 2'-O-Methyl nucleotide
  modified_base 16: mod_base = OTHER; note = 2'-fluoro nucleotide
  modified_base 17: mod_base = OTHER; note = 2'-O-Methyl nucleotide
  modified_base 18: mod_base = OTHER; note = 2'-fluoro nucleotide
  modified_base 19: mod_base = OTHER; note = 2'-O-Methyl nucleotide
  modified_base 20: mod_base = OTHER; note = deoxy-thymine phosphorothioate
  misc_feature 1..19: note = RNA
  misc_feature 20..21: note = DNA
tgcaggttttccaaaggaatt

SEQ ID NO: 1412 - DNA, 21 bp, synthetic construct
  misc_feature 1..21: note = Description of Artificial Sequence: Synthetic oligonucleotide
  source 1..21: mol_type = other DNA
  modified_base 1: mod_base = OTHER; note = 2'-O-Methyl nucleotide
  modified_base 2: mod_base = OTHER; note = 2'-O-Methyl nucleotide
  modified_base 3: mod_base = OTHER; note = 2'-fluoro nucleotide
  modified_base 4: mod_base = OTHER; note = 2'-O-Methyl nucleotide
  modified_base 5: mod_base = OTHER; note = 2'-fluoro nucleotide
  modified_base 6: mod_base = OTHER; note = 2'-O-Methyl nucleotide
  modified_base 7: mod_base = OTHER; note = 2'-fluoro nucleotide
  modified_base 8: mod_base = OTHER; note = 2'-O-Methyl nucleotide
  modified_base 9: mod_base = OTHER; note = 2'-fluoro nucleotide
  modified_base 10: mod_base = OTHER; note = 2'-O-Methyl nucleotide
  modified_base 11: mod_base = OTHER; note = 2'-fluoro nucleotide
  modified_base 12: mod_base = OTHER; note = 2'-O-Methyl nucleotide
  modified_base 13: mod_base = OTHER; note = 2'-fluoro nucleotide
  modified_base 14: mod_base = OTHER; note = 2'-O-Methyl nucleotide
  modified_base 15: mod_base = OTHER; note = 2'-fluoro nucleotide
  modified_base 16: mod_base = OTHER; note = 2'-O-Methyl nucleotide
  modified_base 17: mod_base = OTHER; note = 2'-fluoro nucleotide
  modified_base 18: mod_base = OTHER; note = 2'-O-Methyl nucleotide
  modified_base 19: mod_base = OTHER; note = 2'-fluoro nucleotide
  modified_base 20: mod_base = OTHER; note = deoxy-thymine phosphorothioate
  misc_feature 1..19: note = RNA
  misc_feature 20..21: note = DNA
tcctttggaaaacctgcagtt

SEQ ID NO: 1413 - DNA, 21 bp, synthetic construct
  misc_feature 1..21: note = Description of Artificial Sequence: Synthetic oligonucleotide
  source 1..21: mol_type = other DNA
  modified_base 1: mod_base = OTHER; note = 2'-fluoro nucleotide
  modified_base 2: mod_base = OTHER; note = 2'-fluoro nucleotide
  modified_base 3: mod_base = OTHER; note = 2'-O-Methyl nucleotide
  modified_base 4: mod_base = OTHER; note = 2'-fluoro nucleotide
  modified_base 5: mod_base = OTHER; note = 2'-O-Methyl nucleotide
  modified_base 6: mod_base = OTHER; note = 2'-fluoro nucleotide
  modified_base 7: mod_base = OTHER; note = 2'-O-Methyl nucleotide
  modified_base 8: mod_base = OTHER; note = 2'-fluoro nucleotide
  modified_base 9: mod_base = OTHER; note = 2'-O-Methyl nucleotide
  modified_base 10: mod_base = OTHER; note = 2'-fluoro nucleotide
  modified_base 11: mod_base = OTHER; note = 2'-O-Methyl nucleotide
  modified_base 12: mod_base = OTHER; note = 2'-fluoro nucleotide
  modified_base 13: mod_base = OTHER; note = 2'-O-Methyl nucleotide
  modified_base 14: mod_base = OTHER; note = 2'-fluoro nucleotide
  modified_base 15: mod_base = OTHER; note = 2'-O-Methyl nucleotide
  modified_base 16: mod_base = OTHER; note = 2'-fluoro nucleotide
  modified_base 17: mod_base = OTHER; note = 2'-O-Methyl nucleotide
  modified_base 18: mod_base = OTHER; note = 2'-fluoro nucleotide
  modified_base 19: mod_base = OTHER; note = 2'-O-Methyl nucleotide
  modified_base 20: mod_base = OTHER; note = deoxy-thymine phosphorothioate
  misc_feature 1..19: note = RNA
  misc_feature 20..21: note = DNA
ctgcaggttttccaaaggatt

SEQ ID NO: 1414 - DNA, 21 bp, synthetic construct
  misc_feature 1..21: note = Description of Artificial Sequence: Synthetic oligonucleotide
  source 1..21: mol_type = other DNA
  modified_base 1: mod_base = OTHER; note = 2'-O-Methyl nucleotide
  modified_base 2: mod_base = OTHER; note = 2'-O-Methyl nucleotide
  modified_base 3: mod_base = OTHER; note = 2'-fluoro nucleotide
  modified_base 4: mod_base = OTHER; note = 2'-O-Methyl nucleotide
  modified_base 5: mod_base = OTHER; note = 2'-fluoro nucleotide
  modified_base 6: mod_base = OTHER; note = 2'-O-Methyl nucleotide
  modified_base 7: mod_base = OTHER; note = 2'-fluoro nucleotide
  modified_base 8: mod_base = OTHER; note = 2'-O-Methyl nucleotide
  modified_base 9: mod_base = OTHER; note = 2'-fluoro nucleotide
  modified_base 10: mod_base = OTHER; note = 2'-O-Methyl nucleotide
  modified_base 11: mod_base = OTHER; note = 2'-fluoro nucleotide
  modified_base 12: mod_base = OTHER; note = 2'-O-Methyl nucleotide
  modified_base 13: mod_base = OTHER; note = 2'-fluoro nucleotide
  modified_base 14: mod_base = OTHER; note = 2'-O-Methyl nucleotide
  modified_base 15: mod_base = OTHER; note = 2'-fluoro nucleotide
  modified_base 16: mod_base = OTHER; note = 2'-O-Methyl nucleotide
  modified_base 17: mod_base = OTHER; note = 2'-fluoro nucleotide
  modified_base 18: mod_base = OTHER; note = 2'-O-Methyl nucleotide
  modified_base 19: mod_base = OTHER; note = 2'-fluoro nucleotide
  modified_base 20: mod_base = OTHER; note = deoxy-thymine phosphorothioate
  misc_feature 1..19: note = RNA
  misc_feature 20..21: note = DNA
gaaaacctgcagatcatcatt

SEQ ID NO: 1415 - DNA, 21 bp, synthetic construct
  misc_feature 1..21: note = Description of Artificial Sequence: Synthetic oligonucleotide
  source 1..21: mol_type = other DNA
  modified_base 1: mod_base = OTHER; note = 2'-fluoro nucleotide
  modified_base 2: mod_base = OTHER; note = 2'-fluoro nucleotide
  modified_base 3: mod_base = OTHER; note = 2'-O-Methyl nucleotide
  modified_base 4: mod_base = OTHER; note = 2'-fluoro nucleotide
  modified_base 5: mod_base = OTHER; note = 2'-O-Methyl nucleotide
  modified_base 6: mod_base = OTHER; note = 2'-fluoro nucleotide
  modified_base 7: mod_base = OTHER; note = 2'-O-Methyl nucleotide
  modified_base 8: mod_base = OTHER; note = 2'-fluoro nucleotide
  modified_base 9: mod_base = OTHER; note = 2'-O-Methyl nucleotide
  modified_base 10: mod_base = OTHER; note = 2'-fluoro nucleotide
  modified_base 11: mod_base = OTHER; note = 2'-O-Methyl nucleotide
  modified_base 12: mod_base = OTHER; note = 2'-fluoro nucleotide
  modified_base 13: mod_base = OTHER; note = 2'-O-Methyl nucleotide
  modified_base 14: mod_base = OTHER; note = 2'-fluoro nucleotide
  modified_base 15: mod_base = OTHER; note = 2'-O-Methyl nucleotide
  modified_base 16: mod_base = OTHER; note = 2'-fluoro nucleotide
  modified_base 17: mod_base = OTHER; note = 2'-O-Methyl nucleotide
  modified_base 18: mod_base = OTHER; note = 2'-fluoro nucleotide
  modified_base 19: mod_base = OTHER; note = 2'-O-Methyl nucleotide
  modified_base 20: mod_base = OTHER; note = deoxy-thymine phosphorothioate
  misc_feature 1..19: note = RNA
  misc_feature 20..21: note = DNA
tgatgatctgcaggttttctt

SEQ ID NO: 1416 - DNA, 21 bp, synthetic construct
  misc_feature 1..21: note = Description of Artificial Sequence: Synthetic oligonucleotide
  source 1..21: mol_type = other DNA
  modified_base 1: mod_base = OTHER; note = 2'-O-Methyl nucleotide
  modified_base 2: mod_base = OTHER; note = 2'-O-Methyl nucleotide
  modified_base 3: mod_base = OTHER; note = 2'-fluoro nucleotide
  modified_base 4: mod_base = OTHER; note = 2'-O-Methyl nucleotide
  modified_base 5: mod_base = OTHER; note = 2'-fluoro nucleotide
  modified_base 6: mod_base = OTHER; note = 2'-O-Methyl nucleotide
  modified_base 7: mod_base = OTHER; note = 2'-fluoro nucleotide
  modified_base 8: mod_base = OTHER; note = 2'-O-Methyl nucleotide
  modified_base 9: mod_base = OTHER; note = 2'-fluoro nucleotide
  modified_base 10: mod_base = OTHER; note = 2'-O-Methyl nucleotide
  modified_base 11: mod_base = OTHER; note = 2'-fluoro nucleotide
  modified_base 12: mod_base = OTHER; note = 2'-O-Methyl nucleotide
  modified_base 13: mod_base = OTHER; note = 2'-fluoro nucleotide
  modified_base 14: mod_base = OTHER; note = 2'-O-Methyl nucleotide
  modified_base 15: mod_base = OTHER; note = 2'-fluoro nucleotide
  modified_base 16: mod_base = OTHER; note = 2'-O-Methyl nucleotide
  modified_base 17: mod_base = OTHER; note = 2'-fluoro nucleotide
  modified_base 18: mod_base = OTHER; note = 2'-O-Methyl nucleotide
  modified_base 19: mod_base = OTHER; note = 2'-fluoro nucleotide
  modified_base 20: mod_base = OTHER; note = deoxy-thymine phosphorothioate
  misc_feature 1..19: note = RNA
  misc_feature 20..21: note = DNA
aaaacctgcagatcatcagtt

SEQ ID NO: 1417 - DNA, 21 bp, synthetic construct
  misc_feature 1..21: note = Description of Artificial Sequence: Synthetic oligonucleotide
  source 1..21: mol_type = other DNA
  modified_base 1: mod_base = OTHER; note = 2'-fluoro nucleotide
  modified_base 2: mod_base = OTHER; note = 2'-fluoro nucleotide
  modified_base 3: mod_base = OTHER; note = 2'-O-Methyl nucleotide
  modified_base 4: mod_base = OTHER; note = 2'-fluoro nucleotide
  modified_base 5: mod_base = OTHER; note = 2'-O-Methyl nucleotide
  modified_base 6: mod_base = OTHER; note = 2'-fluoro nucleotide
  modified_base 7: mod_base = OTHER; note = 2'-O-Methyl nucleotide
  modified_base 8: mod_base = OTHER; note = 2'-fluoro nucleotide
  modified_base 9: mod_base = OTHER; note = 2'-O-Methyl nucleotide
  modified_base 10: mod_base = OTHER; note = 2'-fluoro nucleotide
  modified_base 11: mod_base = OTHER; note = 2'-O-Methyl nucleotide
  modified_base 12: mod_base = OTHER; note = 2'-fluoro nucleotide
  modified_base 13: mod_base = OTHER; note = 2'-O-Methyl nucleotide
  modified_base 14: mod_base = OTHER; note = 2'-fluoro nucleotide
  modified_base 15: mod_base = OTHER; note = 2'-O-Methyl nucleotide
  modified_base 16: mod_base = OTHER; note = 2'-fluoro nucleotide
  modified_base 17: mod_base = OTHER; note = 2'-O-Methyl nucleotide
  modified_base 18: mod_base = OTHER; note = 2'-fluoro nucleotide
  modified_base 19: mod_base = OTHER; note = 2'-O-Methyl nucleotide
  modified_base 20: mod_base = OTHER; note = deoxy-thymine phosphorothioate
  misc_feature 1..19: note = RNA
  misc_feature 20..21: note = DNA
ctgatgatctgcaggtttttt

SEQ ID NO: 1418 - DNA, 21 bp, synthetic construct
  misc_feature 1..21: note = Description of Artificial Sequence: Synthetic oligonucleotide
  source 1..21: mol_type = other DNA
  modified_base 1: mod_base = OTHER; note = 2'-O-Methyl nucleotide
  modified_base 2: mod_base = OTHER; note = 2'-O-Methyl nucleotide
  modified_base 3: mod_base = OTHER; note = 2'-fluoro nucleotide
  modified_base 4: mod_base = OTHER; note = 2'-O-Methyl nucleotide
  modified_base 5: mod_base = OTHER; note = 2'-fluoro nucleotide
  modified_base 6: mod_base = OTHER; note = 2'-O-Methyl nucleotide
  modified_base 7: mod_base = OTHER; note = 2'-fluoro nucleotide
  modified_base 8: mod_base = OTHER; note = 2'-O-Methyl nucleotide
  modified_base 9: mod_base = OTHER; note = 2'-fluoro nucleotide
  modified_base 10: mod_base = OTHER; note = 2'-O-Methyl nucleotide
  modified_base 11: mod_base = OTHER; note = 2'-fluoro nucleotide
  modified_base 12: mod_base = OTHER; note = 2'-O-Methyl nucleotide
  modified_base 13: mod_base = OTHER; note = 2'-fluoro nucleotide
  modified_base 14: mod_base = OTHER; note = 2'-O-Methyl nucleotide
  modified_base 15: mod_base = OTHER; note = 2'-fluoro nucleotide
  modified_base 16: mod_base = OTHER; note = 2'-O-Methyl nucleotide
  modified_base 17: mod_base = OTHER; note = 2'-fluoro nucleotide
  modified_base 18: mod_base = OTHER; note = 2'-O-Methyl nucleotide
  modified_base 19: mod_base = OTHER; note = 2'-fluoro nucleotide
  modified_base 20: mod_base = OTHER; note = deoxy-thymine phosphorothioate
  misc_feature 1..19: note = RNA
  misc_feature 20..21: note = DNA
aacctgcagatcatcagagtt

SEQ ID NO: 1419 - DNA, 21 bp, synthetic construct
  misc_feature 1..21: note = Description of Artificial Sequence: Synthetic oligonucleotide
  source 1..21: mol_type = other DNA
  modified_base 1: mod_base = OTHER; note = 2'-fluoro nucleotide
  modified_base 2: mod_base = OTHER; note = 2'-fluoro nucleotide
  modified_base 3: mod_base = OTHER; note = 2'-O-Methyl nucleotide
  modified_base 4: mod_base = OTHER; note = 2'-fluoro nucleotide
  modified_base 5: mod_base = OTHER; note = 2'-O-Methyl nucleotide
  modified_base 6: mod_base = OTHER; note = 2'-fluoro nucleotide
  modified_base 7: mod_base = OTHER; note = 2'-O-Methyl nucleotide
  modified_base 8: mod_base = OTHER; note = 2'-fluoro nucleotide
  modified_base 9: mod_base = OTHER; note = 2'-O-Methyl nucleotide
  modified_base 10: mod_base = OTHER; note = 2'-fluoro nucleotide
  modified_base 11: mod_base = OTHER; note = 2'-O-Methyl nucleotide
  modified_base 12: mod_base = OTHER; note = 2'-fluoro nucleotide
  modified_base 13: mod_base = OTHER; note = 2'-O-Methyl nucleotide
  modified_base 14: mod_base = OTHER; note = 2'-fluoro nucleotide
  modified_base 15: mod_base = OTHER; note = 2'-O-Methyl nucleotide
  modified_base 16: mod_base = OTHER; note = 2'-fluoro nucleotide
  modified_base 17: mod_base = OTHER; note = 2'-O-Methyl nucleotide
  modified_base 18: mod_base = OTHER; note = 2'-fluoro nucleotide
  modified_base 19: mod_base = OTHER; note = 2'-O-Methyl nucleotide
  modified_base 20: mod_base = OTHER; note = deoxy-thymine phosphorothioate
  misc_feature 1..19: note = RNA
  misc_feature 20..21: note = DNA
ctctgatgatctgcaggtttt

SEQ ID NO: 1420 - DNA, 21 bp, synthetic construct
  misc_feature 1..21: note = Description of Artificial Sequence: Synthetic oligonucleotide
  source 1..21: mol_type = other DNA
  modified_base 1: mod_base = OTHER; note = 2'-O-Methyl nucleotide
  modified_base 2: mod_base = OTHER; note = 2'-O-Methyl nucleotide
  modified_base 3: mod_base = OTHER; note = 2'-fluoro nucleotide
  modified_base 4: mod_base = OTHER; note = 2'-O-Methyl nucleotide
  modified_base 5: mod_base = OTHER; note = 2'-fluoro nucleotide
  modified_base 6: mod_base = OTHER; note = 2'-O-Methyl nucleotide
  modified_base 7: mod_base = OTHER; note = 2'-fluoro nucleotide
  modified_base 8: mod_base = OTHER; note = 2'-O-Methyl nucleotide
  modified_base 9: mod_base = OTHER; note = 2'-fluoro nucleotide
  modified_base 10: mod_base = OTHER; note = 2'-O-Methyl nucleotide
  modified_base 11: mod_base = OTHER; note = 2'-fluoro nucleotide
  modified_base 12: mod_base = OTHER; note = 2'-O-Methyl nucleotide
  modified_base 13: mod_base = OTHER; note = 2'-fluoro nucleotide
  modified_base 14: mod_base = OTHER; note = 2'-O-Methyl nucleotide
  modified_base 15: mod_base = OTHER; note = 2'-fluoro nucleotide
  modified_base 16: mod_base = OTHER; note = 2'-O-Methyl nucleotide
  modified_base 17: mod_base = OTHER; note = 2'-fluoro nucleotide
  modified_base 18: mod_base = OTHER; note = 2'-O-Methyl nucleotide
  modified_base 19: mod_base = OTHER; note = 2'-fluoro nucleotide
  modified_base 20: mod_base = OTHER; note = deoxy-thymine phosphorothioate
  misc_feature 1..19: note = RNA
  misc_feature 20..21: note = DNA
ctgcagatcatcagaggaatt

SEQ ID NO: 1421 - DNA, 21 bp, synthetic construct
  misc_feature 1..21: note = Description of Artificial Sequence: Synthetic oligonucleotide
  source 1..21: mol_type = other DNA
  modified_base 1: mod_base = OTHER; note = 2'-fluoro nucleotide
  modified_base 2: mod_base = OTHER; note = 2'-fluoro nucleotide
  modified_base 3: mod_base = OTHER; note = 2'-O-Methyl nucleotide
  modified_base 4: mod_base = OTHER; note = 2'-fluoro nucleotide
  modified_base 5: mod_base = OTHER; note = 2'-O-Methyl nucleotide
  modified_base 6: mod_base = OTHER; note = 2'-fluoro nucleotide
  modified_base 7: mod_base = OTHER; note = 2'-O-Methyl nucleotide
  modified_base 8: mod_base = OTHER; note = 2'-fluoro nucleotide
  modified_base 9: mod_base = OTHER; note = 2'-O-Methyl nucleotide
  modified_base 10: mod_base = OTHER; note = 2'-fluoro nucleotide
  modified_base 11: mod_base = OTHER; note = 2'-O-Methyl nucleotide
  modified_base 12: mod_base = OTHER; note = 2'-fluoro nucleotide
  modified_base 13: mod_base = OTHER; note = 2'-O-Methyl nucleotide
  modified_base 14: mod_base = OTHER; note = 2'-fluoro nucleotide
  modified_base 15: mod_base = OTHER; note = 2'-O-Methyl nucleotide
  modified_base 16: mod_base = OTHER; note = 2'-fluoro nucleotide
  modified_base 17: mod_base = OTHER; note = 2'-O-Methyl nucleotide
  modified_base 18: mod_base = OTHER; note = 2'-fluoro nucleotide
  modified_base 19: mod_base = OTHER; note = 2'-O-Methyl nucleotide
  modified_base 20: mod_base = OTHER; note = deoxy-thymine phosphorothioate
  misc_feature 1..19: note = RNA
  misc_feature 20..21: note = DNA
ttcctctgatgatctgcagtt

SEQ ID NO: 1422 - DNA, 21 bp, synthetic construct
  misc_feature 1..21: note = Description of Artificial Sequence: Synthetic oligonucleotide
  source 1..21: mol_type = other DNA
  modified_base 1: mod_base = OTHER; note = 2'-O-Methyl nucleotide
  modified_base 2: mod_base = OTHER; note = 2'-O-Methyl nucleotide
  modified_base 3: mod_base = OTHER; note = 2'-fluoro nucleotide
  modified_base 4: mod_base = OTHER; note = 2'-O-Methyl nucleotide
  modified_base 5: mod_base = OTHER; note = 2'-fluoro nucleotide
  modified_base 6: mod_base = OTHER; note = 2'-O-Methyl nucleotide
  modified_base 7: mod_base = OTHER; note = 2'-fluoro nucleotide
  modified_base 8: mod_base = OTHER; note = 2'-O-Methyl nucleotide
  modified_base 9: mod_base = OTHER; note = 2'-fluoro nucleotide
  modified_base 10: mod_base = OTHER; note = 2'-O-Methyl nucleotide
  modified_base 11: mod_base = OTHER; note = 2'-fluoro nucleotide
  modified_base 12: mod_base = OTHER; note = 2'-O-Methyl nucleotide
  modified_base 13: mod_base = OTHER; note = 2'-fluoro nucleotide
  modified_base 14: mod_base = OTHER; note = 2'-O-Methyl nucleotide
  modified_base 15: mod_base = OTHER; note = 2'-fluoro nucleotide
  modified_base 16: mod_base = OTHER; note = 2'-O-Methyl nucleotide
  modified_base 17: mod_base = OTHER; note = 2'-fluoro nucleotide
  modified_base 18: mod_base = OTHER; note = 2'-O-Methyl nucleotide
  modified_base 19: mod_base = OTHER; note = 2'-fluoro nucleotide
  modified_base 20: mod_base = OTHER; note = deoxy-thymine phosphorothioate
  misc_feature 1..19: note = RNA
  misc_feature 20..21: note = DNA
gaaaattcctatgccttagtt

SEQ ID NO: 1423 - DNA, 21 bp, synthetic construct
  misc_feature 1..21: note = Description of Artificial Sequence: Synthetic oligonucleotide
  source 1..21: mol_type = other DNA
  modified_base 1: mod_base = OTHER; note = 2'-fluoro nucleotide
  modified_base 2: mod_base = OTHER; note = 2'-fluoro nucleotide
  modified_base 3: mod_base = OTHER; note = 2'-O-Methyl nucleotide
  modified_base 4: mod_base = OTHER; note = 2'-fluoro nucleotide
  modified_base 5: mod_base = OTHER; note = 2'-O-Methyl nucleotide
  modified_base 6: mod_base = OTHER; note = 2'-fluoro nucleotide
  modified_base 7: mod_base = OTHER; note = 2'-O-Methyl nucleotide
  modified_base 8: mod_base = OTHER; note = 2'-fluoro nucleotide
  modified_base 9: mod_base = OTHER; note = 2'-O-Methyl nucleotide
  modified_base 10: mod_base = OTHER; note = 2'-fluoro nucleotide
  modified_base 11: mod_base = OTHER; note = 2'-O-Methyl nucleotide
  modified_base 12: mod_base = OTHER; note = 2'-fluoro nucleotide
  modified_base 13: mod_base = OTHER; note = 2'-O-Methyl nucleotide
  modified_base 14: mod_base = OTHER; note = 2'-fluoro nucleotide
  modified_base 15: mod_base = OTHER; note = 2'-O-Methyl nucleotide
  modified_base 16: mod_base = OTHER; note = 2'-fluoro nucleotide
  modified_base 17: mod_base = OTHER; note = 2'-O-Methyl nucleotide
  modified_base 18: mod_base = OTHER; note = 2'-fluoro nucleotide
  modified_base 19: mod_base = OTHER; note = 2'-O-Methyl nucleotide
  modified_base 20: mod_base = OTHER; note = deoxy-thymine phosphorothioate
  misc_feature 1..19: note = RNA
  misc_feature 20..21: note = DNA
ctaaggcataggaattttctt

SEQ ID NO: 1424 - DNA, 21 bp, synthetic construct
  misc_feature 1..21: note = Description of Artificial Sequence: Synthetic oligonucleotide
  source 1..21: mol_type = other DNA
  modified_base 1: mod_base = OTHER; note = 2'-O-Methyl nucleotide
  modified_base 2: mod_base = OTHER; note = 2'-O-Methyl nucleotide
  modified_base 3: mod_base = OTHER; note = 2'-fluoro nucleotide
  modified_base 4: mod_base = OTHER; note = 2'-O-Methyl nucleotide
  modified_base 5: mod_base = OTHER; note = 2'-fluoro nucleotide
  modified_base 6: mod_base = OTHER; note = 2'-O-Methyl nucleotide
  modified_base 7: mod_base = OTHER; note = 2'-fluoro nucleotide
  modified_base 8: mod_base = OTHER; note = 2'-O-Methyl nucleotide
  modified_base 9: mod_base = OTHER; note = 2'-fluoro nucleotide
  modified_base 10: mod_base = OTHER; note = 2'-O-Methyl nucleotide
  modified_base 11: mod_base = OTHER; note = 2'-fluoro nucleotide
  modified_base 12: mod_base = OTHER; note = 2'-O-Methyl nucleotide
  modified_base 13: mod_base = OTHER; note = 2'-fluoro nucleotide
  modified_base 14: mod_base = OTHER; note = 2'-O-Methyl nucleotide
  modified_base 15: mod_base = OTHER; note = 2'-fluoro nucleotide
  modified_base 16: mod_base = OTHER; note = 2'-O-Methyl nucleotide
  modified_base 17: mod_base = OTHER; note = 2'-fluoro nucleotide
  modified_base 18: mod_base = OTHER; note = 2'-O-Methyl nucleotide
  modified_base 19: mod_base = OTHER; note = 2'-fluoro nucleotide
  modified_base 20: mod_base = OTHER; note = deoxy-thymine phosphorothioate
  misc_feature 1..19: note = RNA
  misc_feature 20..21: note = DNA
aaaattcctatgccttagctt

SEQ ID NO: 1425 - DNA, 21 bp, synthetic construct
  misc_feature 1..21: note = Description of Artificial Sequence: Synthetic oligonucleotide
  source 1..21: mol_type = other DNA
  modified_base 1: mod_base = OTHER; note = 2'-fluoro nucleotide
  modified_base 2: mod_base = OTHER; note = 2'-fluoro nucleotide
  modified_base 3: mod_base = OTHER; note = 2'-O-Methyl nucleotide
  modified_base 4: mod_base = OTHER; note = 2'-fluoro nucleotide
  modified_base 5: mod_base = OTHER; note = 2'-O-Methyl nucleotide
  modified_base 6: mod_base = OTHER; note = 2'-fluoro nucleotide
  modified_base 7: mod_base = OTHER; note = 2'-O-Methyl nucleotide
  modified_base 8: mod_base = OTHER; note = 2'-fluoro nucleotide
  modified_base 9: mod_base = OTHER; note = 2'-O-Methyl nucleotide
  modified_base 10: mod_base = OTHER; note = 2'-fluoro nucleotide
  modified_base 11: mod_base = OTHER; note = 2'-O-Methyl nucleotide
  modified_base 12: mod_base = OTHER; note = 2'-fluoro nucleotide
  modified_base 13: mod_base = OTHER; note = 2'-O-Methyl nucleotide
  modified_base 14: mod_base = OTHER; note = 2'-fluoro nucleotide
  modified_base 15: mod_base = OTHER; note = 2'-O-Methyl nucleotide
  modified_base 16: mod_base = OTHER; note = 2'-fluoro nucleotide
  modified_base 17: mod_base = OTHER; note = 2'-O-Methyl nucleotide
  modified_base 18: mod_base = OTHER; note = 2'-fluoro nucleotide
  modified_base 19: mod_base = OTHER; note = 2'-O-Methyl nucleotide
  modified_base 20: mod_base = OTHER; note = deoxy-thymine phosphorothioate
  misc_feature 1..19: note = RNA
  misc_feature 20..21: note = DNA
gctaaggcataggaatttttt

SEQ ID NO: 1426 - DNA, 21 bp, synthetic construct
  misc_feature 1..21: note = Description of Artificial Sequence: Synthetic oligonucleotide
  source 1..21: mol_type = other DNA
  modified_base 1: mod_base = OTHER; note = 2'-O-Methyl nucleotide
  modified_base 2: mod_base = OTHER; note = 2'-O-Methyl nucleotide
  modified_base 3: mod_base = OTHER; note = 2'-fluoro nucleotide
  modified_base 4: mod_base = OTHER; note = 2'-O-Methyl nucleotide
  modified_base 5: mod_base = OTHER; note = 2'-fluoro nucleotide
  modified_base 6: mod_base = OTHER; note = 2'-O-Methyl nucleotide
  modified_base 7: mod_base = OTHER; note = 2'-fluoro nucleotide
  modified_base 8: mod_base = OTHER; note = 2'-O-Methyl nucleotide
  modified_base 9: mod_base = OTHER; note = 2'-fluoro nucleotide
  modified_base 10: mod_base = OTHER; note = 2'-O-Methyl nucleotide
  modified_base 11: mod_base = OTHER; note = 2'-fluoro nucleotide
  modified_base 12: mod_base = OTHER; note = 2'-O-Methyl nucleotide
  modified_base 13: mod_base = OTHER; note = 2'-fluoro nucleotide
  modified_base 14: mod_base = OTHER; note = 2'-O-Methyl nucleotide
  modified_base 15: mod_base = OTHER; note = 2'-fluoro nucleotide
  modified_base 16: mod_base = OTHER; note = 2'-O-Methyl nucleotide
  modified_base 17: mod_base = OTHER; note = 2'-fluoro nucleotide
  modified_base 18: mod_base = OTHER; note = 2'-O-Methyl nucleotide
  modified_base 19: mod_base = OTHER; note = 2'-fluoro nucleotide
  modified_base 20: mod_base = OTHER; note = deoxy-thymine phosphorothioate
  misc_feature 1..19: note = RNA
  misc_feature 20..21: note = DNA
aattcctatgccttagcagtt

SEQ ID NO: 1427 - DNA, 21 bp, synthetic construct
  misc_feature 1..21: note = Description of Artificial Sequence: Synthetic oligonucleotide
  source 1..21: mol_type = other DNA
  modified_base 1: mod_base = OTHER; note = 2'-fluoro nucleotide
  modified_base 2: mod_base = OTHER; note = 2'-fluoro nucleotide
  modified_base 3: mod_base = OTHER; note = 2'-O-Methyl nucleotide
  modified_base 4: mod_base = OTHER; note = 2'-fluoro nucleotide
  modified_base 5: mod_base = OTHER; note = 2'-O-Methyl nucleotide
  modified_base 6: mod_base = OTHER; note = 2'-fluoro nucleotide
  modified_base 7: mod_base = OTHER; note = 2'-O-Methyl nucleotide
  modified_base 8: mod_base = OTHER; note = 2'-fluoro nucleotide
  modified_base 9: mod_base = OTHER; note = 2'-O-Methyl nucleotide
  modified_base 10: mod_base = OTHER; note = 2'-fluoro nucleotide
  modified_base 11: mod_base = OTHER; note = 2'-O-Methyl nucleotide
  modified_base 12: mod_base = OTHER; note = 2'-fluoro nucleotide
  modified_base 13: mod_base = OTHER; note = 2'-O-Methyl nucleotide
  modified_base 14: mod_base = OTHER; note = 2'-fluoro nucleotide
  modified_base 15: mod_base = OTHER; note = 2'-O-Methyl nucleotide
  modified_base 16: mod_base = OTHER; note = 2'-fluoro nucleotide
  modified_base 17: mod_base = OTHER; note = 2'-O-Methyl nucleotide
  modified_base 18: mod_base = OTHER; note = 2'-fluoro nucleotide
  modified_base 19: mod_base = OTHER; note = 2'-O-Methyl nucleotide
  modified_base 20: mod_base = OTHER; note = deoxy-thymine phosphorothioate
  misc_feature 1..19: note = RNA
  misc_feature 20..21: note = DNA
ctgctaaggcataggaatttt

SEQ ID NO: 1428 - DNA, 21 bp, synthetic construct
  misc_feature 1..21: note = Description of Artificial Sequence: Synthetic oligonucleotide
  source 1..21: mol_type = other DNA
  modified_base 1: mod_base = OTHER; note = 2'-O-Methyl nucleotide
  modified_base 2: mod_base = OTHER; note = 2'-O-Methyl nucleotide
  modified_base 3: mod_base = OTHER; note = 2'-fluoro nucleotide
  modified_base 4: mod_base = OTHER; note = 2'-O-Methyl nucleotide
  modified_base 5: mod_base = OTHER; note = 2'-fluoro nucleotide
  modified_base 6: mod_base = OTHER; note = 2'-O-Methyl nucleotide
  modified_base 7: mod_base = OTHER; note = 2'-fluoro nucleotide
  modified_base 8: mod_base = OTHER; note = 2'-O-Methyl nucleotide
  modified_base 9: mod_base = OTHER; note = 2'-fluoro nucleotide
  modified_base 10: mod_base = OTHER; note = 2'-O-Methyl nucleotide
  modified_base 11: mod_base = OTHER; note = 2'-fluoro nucleotide
  modified_base 12: mod_base = OTHER; note = 2'-O-Methyl nucleotide
  modified_base 13: mod_base = OTHER; note = 2'-fluoro nucleotide
  modified_base 14: mod_base = OTHER; note = 2'-O-Methyl nucleotide
  modified_base 15: mod_base = OTHER; note = 2'-fluoro nucleotide
  modified_base 16: mod_base = OTHER; note = 2'-O-Methyl nucleotide
  modified_base 17: mod_base = OTHER; note = 2'-fluoro nucleotide
  modified_base 18: mod_base = OTHER; note = 2'-O-Methyl nucleotide
  modified_base 19: mod_base = OTHER; note = 2'-fluoro nucleotide
  modified_base 20: mod_base = OTHER; note = deoxy-thymine phosphorothioate
  misc_feature 1..19: note = RNA
  misc_feature 20..21: note = DNA
tcctatgccttagcagtcttt

SEQ ID NO: 1429 - DNA, 21 bp, synthetic construct
  misc_feature 1..21: note = Description of Artificial Sequence: Synthetic oligonucleotide
  source 1..21: mol_type = other DNA
  modified_base 1: mod_base = OTHER; note = 2'-fluoro nucleotide
  modified_base 2: mod_base = OTHER; note = 2'-fluoro nucleotide
  modified_base 3: mod_base = OTHER; note = 2'-O-Methyl nucleotide
  modified_base 4: mod_base = OTHER; note = 2'-fluoro nucleotide
  modified_base 5: mod_base = OTHER; note = 2'-O-Methyl nucleotide
  modified_base 6: mod_base = OTHER; note = 2'-fluoro nucleotide
  modified_base 7: mod_base = OTHER; note = 2'-O-Methyl nucleotide
  modified_base 8: mod_base = OTHER; note = 2'-fluoro nucleotide
  modified_base 9: mod_base = OTHER; note = 2'-O-Methyl nucleotide
  modified_base 10: mod_base = OTHER; note = 2'-fluoro nucleotide
  modified_base 11: mod_base = OTHER; note = 2'-O-Methyl nucleotide
  modified_base 12: mod_base = OTHER; note = 2'-fluoro nucleotide
  modified_base 13: mod_base = OTHER; note = 2'-O-Methyl nucleotide
  modified_base 14: mod_base = OTHER; note = 2'-fluoro nucleotide
  modified_base 15: mod_base = OTHER; note = 2'-O-Methyl nucleotide
  modified_base 16: mod_base = OTHER; note = 2'-fluoro nucleotide
  modified_base 17: mod_base = OTHER; note = 2'-O-Methyl nucleotide
  modified_base 18: mod_base = OTHER; note = 2'-fluoro nucleotide
  modified_base 19: mod_base = OTHER; note = 2'-O-Methyl nucleotide
  modified_base 20: mod_base = OTHER; note = deoxy-thymine phosphorothioate
  misc_feature 1..19: note = RNA
  misc_feature 20..21: note = DNA
agactgctaaggcataggatt

SEQ ID NO: 1430 - DNA, 21 bp, synthetic construct
  misc_feature 1..21: note = Description of Artificial Sequence: Synthetic oligonucleotide
  source 1..21: mol_type = other DNA
  modified_base 1: mod_base = OTHER; note = 2'-O-Methyl nucleotide
  modified_base 2: mod_base = OTHER; note = 2'-O-Methyl nucleotide
  modified_base 3: mod_base = OTHER; note = 2'-fluoro nucleotide
  modified_base 4: mod_base = OTHER; note = 2'-O-Methyl nucleotide
  modified_base 5: mod_base = OTHER; note = 2'-fluoro nucleotide
  modified_base 6: mod_base = OTHER; note = 2'-O-Methyl nucleotide
  modified_base 7: mod_base = OTHER; note = 2'-fluoro nucleotide
  modified_base 8: mod_base = OTHER; note = 2'-O-Methyl nucleotide
  modified_base 9: mod_base = OTHER; note = 2'-fluoro nucleotide
  modified_base 10: mod_base = OTHER; note = 2'-O-Methyl nucleotide
  modified_base 11: mod_base = OTHER; note = 2'-fluoro nucleotide
  modified_base 12: mod_base = OTHER; note = 2'-O-Methyl nucleotide
  modified_base 13: mod_base = OTHER; note = 2'-fluoro nucleotide
  modified_base 14: mod_base = OTHER; note = 2'-O-Methyl nucleotide
  modified_base 15: mod_base = OTHER; note = 2'-fluoro nucleotide
  modified_base 16: mod_base = OTHER; note = 2'-O-Methyl nucleotide
  modified_base 17: mod_base = OTHER; note = 2'-fluoro nucleotide
  modified_base 18: mod_base = OTHER; note = 2'-O-Methyl nucleotide
  modified_base 19: mod_base = OTHER; note = 2'-fluoro nucleotide
  modified_base 20: mod_base = OTHER; note = deoxy-thymine phosphorothioate
  misc_feature 1..19: note = RNA
  misc_feature 20..21: note = DNA
cctatgccttagcagtctttt

SEQ ID NO: 1431 - DNA, 21 bp, synthetic construct
  misc_feature 1..21: note = Description of Artificial Sequence: Synthetic oligonucleotide
  source 1..21: mol_type = other DNA
  modified_base 1: mod_base = OTHER; note = 2'-fluoro nucleotide
  modified_base 2: mod_base = OTHER; note = 2'-fluoro nucleotide
  modified_base 3: mod_base = OTHER; note = 2'-O-Methyl nucleotide
  modified_base 4: mod_base = OTHER; note = 2'-fluoro nucleotide
  modified_base 5: mod_base = OTHER; note = 2'-O-Methyl nucleotide
  modified_base 6: mod_base = OTHER; note = 2'-fluoro nucleotide
  modified_base 7: mod_base = OTHER; note = 2'-O-Methyl nucleotide
  modified_base 8: mod_base = OTHER; note = 2'-fluoro nucleotide
  modified_base 9: mod_base = OTHER; note = 2'-O-Methyl nucleotide
  modified_base 10: mod_base = OTHER; note = 2'-fluoro nucleotide
  modified_base 11: mod_base = OTHER; note = 2'-O-Methyl nucleotide
  modified_base 12: mod_base = OTHER; note = 2'-fluoro nucleotide
  modified_base 13: mod_base = OTHER; note = 2'-O-Methyl nucleotide
  modified_base 14: mod_base = OTHER; note = 2'-fluoro nucleotide
  modified_base 15: mod_base = OTHER; note = 2'-O-Methyl nucleotide
  modified_base 16: mod_base = OTHER; note = 2'-fluoro nucleotide
  modified_base 17: mod_base = OTHER; note = 2'-O-Methyl nucleotide
  modified_base 18: mod_base = OTHER; note = 2'-fluoro nucleotide
  modified_base 19: mod_base = OTHER; note = 2'-O-Methyl nucleotide
  modified_base 20: mod_base = OTHER; note = deoxy-thymine phosphorothioate
  misc_feature 1..19: note = RNA
  misc_feature 20..21: note = DNA
aagactgctaaggcataggtt

SEQ ID NO: 1432 - DNA, 21 bp, synthetic construct
  misc_feature 1..21: note = Description of Artificial Sequence: Synthetic oligonucleotide
  source 1..21: mol_type = other DNA
  modified_base 1: mod_base = OTHER; note = 2'-O-Methyl nucleotide
  modified_base 2: mod_base = OTHER; note = 2'-O-Methyl nucleotide
  modified_base 3: mod_base = OTHER; note = 2'-fluoro nucleotide
  modified_base 4: mod_base = OTHER; note = 2'-O-Methyl nucleotide
  modified_base 5: mod_base = OTHER; note = 2'-fluoro nucleotide
  modified_base 6: mod_base = OTHER; note = 2'-O-Methyl nucleotide
  modified_base 7: mod_base = OTHER; note = 2'-fluoro nucleotide
  modified_base 8: mod_base = OTHER; note = 2'-O-Methyl nucleotide
  modified_base 9: mod_base = OTHER; note = 2'-fluoro nucleotide
  modified_base 10: mod_base = OTHER; note = 2'-O-Methyl nucleotide
  modified_base 11: mod_base = OTHER; note = 2'-fluoro nucleotide
  modified_base 12: mod_base = OTHER; note = 2'-O-Methyl nucleotide
  modified_base 13: mod_base = OTHER; note = 2'-fluoro nucleotide
  modified_base 14: mod_base = OTHER; note = 2'-O-Methyl nucleotide
  modified_base 15: mod_base = OTHER; note = 2'-fluoro nucleotide
  modified_base 16: mod_base = OTHER; note = 2'-O-Methyl nucleotide
  modified_base 17: mod_base = OTHER; note = 2'-fluoro nucleotide
  modified_base 18: mod_base = OTHER; note = 2'-O-Methyl nucleotide
  modified_base 19: mod_base = OTHER; note = 2'-fluoro nucleotide
  modified_base 20: mod_base = OTHER; note = deoxy-thymine phosphorothioate
  misc_feature 1..19: note = RNA
  misc_feature 20..21: note = DNA
ctatgccttagcagtcttatt

SEQ ID NO: 1433 - DNA, 21 bp, synthetic construct
  misc_feature 1..21: note = Description of Artificial Sequence: Synthetic oligonucleotide
  source 1..21: mol_type = other DNA
  modified_base 1: mod_base = OTHER; note = 2'-fluoro nucleotide
  modified_base 2: mod_base = OTHER; note = 2'-fluoro nucleotide
  modified_base 3: mod_base = OTHER; note = 2'-O-Methyl nucleotide
  modified_base 4: mod_base = OTHER; note = 2'-fluoro nucleotide
  modified_base 5: mod_base = OTHER; note = 2'-O-Methyl nucleotide
  modified_base 6: mod_base = OTHER; note = 2'-fluoro nucleotide
  modified_base 7: mod_base = OTHER; note = 2'-O-Methyl nucleotide
  modified_base 8: mod_base = OTHER; note = 2'-fluoro nucleotide
  modified_base 9: mod_base = OTHER; note = 2'-O-Methyl nucleotide
  modified_base 10: mod_base = OTHER; note = 2'-fluoro nucleotide
  modified_base 11: mod_base = OTHER; note = 2'-O-Methyl nucleotide
  modified_base 12: mod_base = OTHER; note = 2'-fluoro nucleotide
  modified_base 13: mod_base = OTHER; note = 2'-O-Methyl nucleotide
  modified_base 14: mod_base = OTHER; note = 2'-fluoro nucleotide
  modified_base 15: mod_base = OTHER; note = 2'-O-Methyl nucleotide
  modified_base 16: mod_base = OTHER; note = 2'-fluoro nucleotide
  modified_base 17: mod_base = OTHER; note = 2'-O-Methyl nucleotide
  modified_base 18: mod_base = OTHER; note = 2'-fluoro nucleotide
  modified_base 19: mod_base = OTHER; note = 2'-O-Methyl nucleotide
  modified_base 20: mod_base = OTHER; note = deoxy-thymine phosphorothioate
  misc_feature 1..19: note = RNA
  misc_feature 20..21: note = DNA
taagactgctaaggcatagtt

SEQ ID NO: 1434 - DNA, 21 bp, synthetic construct
  misc_feature 1..21: note = Description of Artificial Sequence: Synthetic oligonucleotide
  source 1..21: mol_type = other DNA
  modified_base 1: mod_base = OTHER; note = 2'-O-Methyl nucleotide
  modified_base 2: mod_base = OTHER; note = 2'-O-Methyl nucleotide
  modified_base 3: mod_base = OTHER; note = 2'-fluoro nucleotide
  modified_base 4: mod_base = OTHER; note = 2'-O-Methyl nucleotide
  modified_base 5: mod_base = OTHER; note = 2'-fluoro nucleotide
  modified_base 6: mod_base = OTHER; note = 2'-O-Methyl nucleotide
  modified_base 7: mod_base = OTHER; note = 2'-fluoro nucleotide
  modified_base 8: mod_base = OTHER; note = 2'-O-Methyl nucleotide
  modified_base 9: mod_base = OTHER; note = 2'-fluoro nucleotide
  modified_base 10: mod_base = OTHER; note = 2'-O-Methyl nucleotide
  modified_base 11: mod_base = OTHER; note = 2'-fluoro nucleotide
  modified_base 12: mod_base = OTHER; note = 2'-O-Methyl nucleotide
  modified_base 13: mod_base = OTHER; note = 2'-fluoro nucleotide
  modified_base 14: mod_base = OTHER; note = 2'-O-Methyl nucleotide
  modified_base 15: mod_base = OTHER; note = 2'-fluoro nucleotide
  modified_base 16: mod_base = OTHER; note = 2'-O-Methyl nucleotide
  modified_base 17: mod_base = OTHER; note = 2'-fluoro nucleotide
  modified_base 18: mod_base = OTHER; note = 2'-O-Methyl nucleotide
  modified_base 19: mod_base = OTHER; note = 2'-fluoro nucleotide
  modified_base 20: mod_base = OTHER; note = deoxy-thymine phosphorothioate
  misc_feature 1..19: note = RNA
  misc_feature 20..21: note = DNA
atgccttagcagtcttatctt

SEQ ID NO: 1435 - DNA, 21 bp, synthetic construct
  misc_feature 1..21: note = Description of Artificial Sequence: Synthetic oligonucleotide
  source 1..21: mol_type = other DNA
  modified_base 1: mod_base = OTHER; note = 2'-fluoro nucleotide
  modified_base 2: mod_base = OTHER; note = 2'-fluoro nucleotide
  modified_base 3: mod_base = OTHER; note = 2'-O-Methyl nucleotide
  modified_base 4: mod_base = OTHER; note = 2'-fluoro nucleotide
  modified_base 5: mod_base = OTHER; note = 2'-O-Methyl nucleotide
  modified_base 6: mod_base = OTHER; note = 2'-fluoro nucleotide
  modified_base 7: mod_base = OTHER; note = 2'-O-Methyl nucleotide
  modified_base 8: mod_base = OTHER; note = 2'-fluoro nucleotide
  modified_base 9: mod_base = OTHER; note = 2'-O-Methyl nucleotide
  modified_base 10: mod_base = OTHER; note = 2'-fluoro nucleotide
  modified_base 11: mod_base = OTHER; note = 2'-O-Methyl nucleotide
  modified_base 12: mod_base = OTHER; note = 2'-fluoro nucleotide
  modified_base 13: mod_base = OTHER; note = 2'-O-Methyl nucleotide
  modified_base 14: mod_base = OTHER; note = 2'-fluoro nucleotide
  modified_base 15: mod_base = OTHER; note = 2'-O-Methyl nucleotide
  modified_base 16: mod_base = OTHER; note = 2'-fluoro nucleotide
  modified_base 17: mod_base = OTHER; note = 2'-O-Methyl nucleotide
  modified_base 18: mod_base = OTHER; note = 2'-fluoro nucleotide
  modified_base 19: mod_base = OTHER; note = 2'-O-Methyl nucleotide
  modified_base 20: mod_base = OTHER; note = deoxy-thymine phosphorothioate
  misc_feature 1..19: note = RNA
  misc_feature 20..21: note = DNA
gataagactgctaaggcattt

SEQ ID NO: 1436 - DNA, 21 bp, synthetic construct
  misc_feature 1..21: note = Description of Artificial Sequence: Synthetic oligonucleotide
  source 1..21: mol_type = other DNA
  modified_base 1: mod_base = OTHER; note = 2'-O-Methyl nucleotide
  modified_base 2: mod_base = OTHER; note = 2'-O-Methyl nucleotide
  modified_base 3: mod_base = OTHER; note = 2'-fluoro nucleotide
  modified_base 4: mod_base = OTHER; note = 2'-O-Methyl nucleotide
  modified_base 5: mod_base = OTHER; note = 2'-fluoro nucleotide
  modified_base 6: mod_base = OTHER; note = 2'-O-Methyl nucleotide
  modified_base 7: mod_base = OTHER; note = 2'-fluoro nucleotide
  modified_base 8: mod_base = OTHER; note = 2'-O-Methyl nucleotide
  modified_base 9: mod_base = OTHER; note = 2'-fluoro nucleotide
  modified_base 10: mod_base = OTHER; note = 2'-O-Methyl nucleotide
  modified_base 11: mod_base = OTHER; note = 2'-fluoro nucleotide
  modified_base 12: mod_base = OTHER; note = 2'-O-Methyl nucleotide
  modified_base 13: mod_base = OTHER; note = 2'-fluoro nucleotide
  modified_base 14: mod_base = OTHER; note = 2'-O-Methyl nucleotide
  modified_base 15: mod_base = OTHER; note = 2'-fluoro nucleotide
  modified_base 16: mod_base = OTHER; note = 2'-O-Methyl nucleotide
  modified_base 17: mod_base = OTHER; note = 2'-fluoro nucleotide
  modified_base 18: mod_base = OTHER; note = 2'-O-Methyl nucleotide
  modified_base 19: mod_base = OTHER; note = 2'-fluoro nucleotide
  modified_base 20: mod_base = OTHER; note = deoxy-thymine phosphorothioate
  misc_feature 1..19: note = RNA
  misc_feature 20..21: note = DNA
tgccttagcagtcttatcttt

SEQ ID NO: 1437 - DNA, 21 bp, synthetic construct
  misc_feature 1..21: note = Description of Artificial Sequence: Synthetic oligonucleotide
  source 1..21: mol_type = other DNA
  modified_base 1: mod_base = OTHER; note = 2'-fluoro nucleotide
  modified_base 2: mod_base = OTHER; note = 2'-fluoro nucleotide
  modified_base 3: mod_base = OTHER; note = 2'-O-Methyl nucleotide
  modified_base 4: mod_base = OTHER; note = 2'-fluoro nucleotide
  modified_base 5: mod_base = OTHER; note = 2'-O-Methyl nucleotide
  modified_base 6: mod_base = OTHER; note = 2'-fluoro nucleotide
  modified_base 7: mod_base = OTHER; note = 2'-O-Methyl nucleotide
  modified_base 8: mod_base = OTHER; note = 2'-fluoro nucleotide
  modified_base 9: mod_base = OTHER; note = 2'-O-Methyl nucleotide
  modified_base 10: mod_base = OTHER; note = 2'-fluoro nucleotide
  modified_base 11: mod_base = OTHER; note = 2'-O-Methyl nucleotide
  modified_base 12: mod_base = OTHER; note = 2'-fluoro nucleotide
  modified_base 13: mod_base = OTHER; note = 2'-O-Methyl nucleotide
  modified_base 14: mod_base = OTHER; note = 2'-fluoro nucleotide
  modified_base 15: mod_base = OTHER; note = 2'-O-Methyl nucleotide
  modified_base 16: mod_base = OTHER; note = 2'-fluoro nucleotide
  modified_base 17: mod_base = OTHER; note = 2'-O-Methyl nucleotide
  modified_base 18: mod_base = OTHER; note = 2'-fluoro nucleotide
  modified_base 19: mod_base = OTHER; note = 2'-O-Methyl nucleotide
  modified_base 20: mod_base = OTHER; note = deoxy-thymine phosphorothioate
  misc_feature 1..19: note = RNA
  misc_feature 20..21: note = DNA
agataagactgctaaggcatt

SEQ ID NO: 1438 - DNA, 21 bp, synthetic construct
  misc_feature 1..21: note = Description of Artificial Sequence: Synthetic oligonucleotide
  source 1..21: mol_type = other DNA
  modified_base 1: mod_base = OTHER; note = 2'-O-Methyl nucleotide
  modified_base 2: mod_base = OTHER; note = 2'-O-Methyl nucleotide
  modified_base 3: mod_base = OTHER; note = 2'-fluoro nucleotide
  modified_base 4: mod_base = OTHER; note = 2'-O-Methyl nucleotide
  modified_base 5: mod_base = OTHER; note = 2'-fluoro nucleotide
  modified_base 6: mod_base = OTHER; note = 2'-O-Methyl nucleotide
  modified_base 7: mod_base = OTHER; note = 2'-fluoro nucleotide
  modified_base 8: mod_base = OTHER; note = 2'-O-Methyl nucleotide
  modified_base 9: mod_base = OTHER; note = 2'-fluoro nucleotide
  modified_base 10: mod_base = OTHER; note = 2'-O-Methyl nucleotide
  modified_base 11: mod_base = OTHER; note = 2'-fluoro nucleotide
  modified_base 12: mod_base = OTHER; note = 2'-O-Methyl nucleotide
  modified_base 13: mod_base = OTHER; note = 2'-fluoro nucleotide
  modified_base 14: mod_base = OTHER; note = 2'-O-Methyl nucleotide
  modified_base 15: mod_base = OTHER; note = 2'-fluoro nucleotide
  modified_base 16: mod_base = OTHER; note = 2'-O-Methyl nucleotide
  modified_base 17: mod_base = OTHER; note = 2'-fluoro nucleotide
  modified_base 18: mod_base = OTHER; note = 2'-O-Methyl nucleotide
  modified_base 19: mod_base = OTHER; note = 2'-fluoro nucleotide
  modified_base 20: mod_base = OTHER; note = deoxy-thymine phosphorothioate
  misc_feature 1..19: note = RNA
  misc_feature 20..21: note = DNA
gccttagcagtcttatctatt

SEQ ID NO: 1439 - DNA, 21 bp, synthetic construct
  misc_feature 1..21: note = Description of Artificial Sequence: Synthetic oligonucleotide
  source 1..21: mol_type = other DNA
  modified_base 1: mod_base = OTHER; note = 2'-fluoro nucleotide
  modified_base 2: mod_base = OTHER; note = 2'-fluoro nucleotide
  modified_base 3: mod_base = OTHER; note = 2'-O-Methyl nucleotide
  modified_base 4: mod_base = OTHER; note = 2'-fluoro nucleotide
  modified_base 5: mod_base = OTHER; note = 2'-O-Methyl nucleotide
  modified_base 6: mod_base = OTHER; note = 2'-fluoro nucleotide
  modified_base 7: mod_base = OTHER; note = 2'-O-Methyl nucleotide
  modified_base 8: mod_base = OTHER; note = 2'-fluoro nucleotide
  modified_base 9: mod_base = OTHER; note = 2'-O-Methyl nucleotide
  modified_base 10: mod_base = OTHER; note = 2'-fluoro nucleotide
  modified_base 11: mod_base = OTHER; note = 2'-O-Methyl nucleotide
  modified_base 12: mod_base = OTHER; note = 2'-fluoro nucleotide
  modified_base 13: mod_base = OTHER; note = 2'-O-Methyl nucleotide
  modified_base 14: mod_base = OTHER; note = 2'-fluoro nucleotide
  modified_base 15: mod_base = OTHER; note = 2'-O-Methyl nucleotide
  modified_base 16: mod_base = OTHER; note = 2'-fluoro nucleotide
  modified_base 17: mod_base = OTHER; note = 2'-O-Methyl nucleotide
  modified_base 18: mod_base = OTHER; note = 2'-fluoro nucleotide
  modified_base 19: mod_base = OTHER; note = 2'-O-Methyl nucleotide
  modified_base 20: mod_base = OTHER; note = deoxy-thymine phosphorothioate
  misc_feature 1..19: note = RNA
  misc_feature 20..21: note = DNA
tagataagactgctaaggctt

SEQ ID NO: 1440 - DNA, 21 bp, synthetic construct
  misc_feature 1..21: note = Description of Artificial Sequence: Synthetic oligonucleotide
  source 1..21: mol_type = other DNA
  modified_base 1: mod_base = OTHER; note = 2'-O-Methyl nucleotide
  modified_base 2: mod_base = OTHER; note = 2'-O-Methyl nucleotide
  modified_base 3: mod_base = OTHER; note = 2'-fluoro nucleotide
  modified_base 4: mod_base = OTHER; note = 2'-O-Methyl nucleotide
  modified_base 5: mod_base = OTHER; note = 2'-fluoro nucleotide
  modified_base 6: mod_base = OTHER; note = 2'-O-Methyl nucleotide
  modified_base 7: mod_base = OTHER; note = 2'-fluoro nucleotide
  modified_base 8: mod_base = OTHER; note = 2'-O-Methyl nucleotide
  modified_base 9: mod_base = OTHER; note = 2'-fluoro nucleotide
  modified_base 10: mod_base = OTHER; note = 2'-O-Methyl nucleotide
  modified_base 11: mod_base = OTHER; note = 2'-fluoro nucleotide
  modified_base 12: mod_base = OTHER; note = 2'-O-Methyl nucleotide
  modified_base 13: mod_base = OTHER; note = 2'-fluoro nucleotide
  modified_base 14: mod_base = OTHER; note = 2'-O-Methyl nucleotide
  modified_base 15: mod_base = OTHER; note = 2'-fluoro nucleotide
  modified_base 16: mod_base = OTHER; note = 2'-O-Methyl nucleotide
  modified_base 17: mod_base = OTHER; note = 2'-fluoro nucleotide
  modified_base 18: mod_base = OTHER; note = 2'-O-Methyl nucleotide
  modified_base 19: mod_base = OTHER; note = 2'-fluoro nucleotide
  modified_base 20: mod_base = OTHER; note = deoxy-thymine phosphorothioate
  misc_feature 1..19: note = RNA
  misc_feature 20..21: note = DNA
ccttagcagtcttatctaatt

SEQ ID NO: 1441 - DNA, 21 bp, synthetic construct
  misc_feature 1..21: note = Description of Artificial Sequence: Synthetic oligonucleotide
  source 1..21: mol_type = other DNA
  modified_base 1: mod_base = OTHER; note = 2'-fluoro nucleotide
  modified_base 2: mod_base = OTHER; note = 2'-fluoro nucleotide
  modified_base 3: mod_base = OTHER; note = 2'-O-Methyl nucleotide
  modified_base 4: mod_base = OTHER; note = 2'-fluoro nucleotide
  modified_base 5: mod_base = OTHER; note = 2'-O-Methyl nucleotide
  modified_base 6: mod_base = OTHER; note = 2'-fluoro nucleotide
  modified_base 7: mod_base = OTHER; note = 2'-O-Methyl nucleotide
  modified_base 8: mod_base = OTHER; note = 2'-fluoro nucleotide
  modified_base 9: mod_base = OTHER; note = 2'-O-Methyl nucleotide
  modified_base 10: mod_base = OTHER; note = 2'-fluoro nucleotide
  modified_base 11: mod_base = OTHER; note = 2'-O-Methyl nucleotide
  modified_base 12: mod_base = OTHER; note = 2'-fluoro nucleotide
  modified_base 13: mod_base = OTHER; note = 2'-O-Methyl nucleotide
  modified_base 14: mod_base = OTHER; note = 2'-fluoro nucleotide
  modified_base 15: mod_base = OTHER; note = 2'-O-Methyl nucleotide
  modified_base 16: mod_base = OTHER; note = 2'-fluoro nucleotide
  modified_base 17: mod_base = OTHER; note = 2'-O-Methyl nucleotide
  modified_base 18: mod_base = OTHER; note = 2'-fluoro nucleotide
  modified_base 19: mod_base = OTHER; note = 2'-O-Methyl nucleotide
  modified_base 20: mod_base = OTHER; note = deoxy-thymine phosphorothioate
  misc_feature 1..19: note = RNA
  misc_feature 20..21: note = DNA
ttagataagactgctaaggtt

SEQ ID NO: 1442 - DNA, 21 bp, synthetic construct
  misc_feature 1..21: note = Description of Artificial Sequence: Synthetic oligonucleotide
  source 1..21: mol_type = other DNA
  modified_base 1: mod_base = OTHER; note = 2'-O-Methyl nucleotide
  modified_base 2: mod_base = OTHER; note = 2'-O-Methyl nucleotide
  modified_base 3: mod_base = OTHER; note = 2'-fluoro nucleotide
  modified_base 4: mod_base = OTHER; note = 2'-O-Methyl nucleotide
  modified_base 5: mod_base = OTHER; note = 2'-fluoro nucleotide
  modified_base 6: mod_base = OTHER; note = 2'-O-Methyl nucleotide
  modified_base 7: mod_base = OTHER; note = 2'-fluoro nucleotide
  modified_base 8: mod_base = OTHER; note = 2'-O-Methyl nucleotide
  modified_base 9: mod_base = OTHER; note = 2'-fluoro nucleotide
  modified_base 10: mod_base = OTHER; note = 2'-O-Methyl nucleotide
  modified_base 11: mod_base = OTHER; note = 2'-fluoro nucleotide
  modified_base 12: mod_base = OTHER; note = 2'-O-Methyl nucleotide
  modified_base 13: mod_base = OTHER; note = 2'-fluoro nucleotide
  modified_base 14: mod_base = OTHER; note = 2'-O-Methyl nucleotide
  modified_base 15: mod_base = OTHER; note = 2'-fluoro nucleotide
  modified_base 16: mod_base = OTHER; note = 2'-O-Methyl nucleotide
  modified_base 17: mod_base = OTHER; note = 2'-fluoro nucleotide
  modified_base 18: mod_base = OTHER; note = 2'-O-Methyl nucleotide
  modified_base 19: mod_base = OTHER; note = 2'-fluoro nucleotide
  modified_base 20: mod_base = OTHER; note = deoxy-thymine phosphorothioate
  misc_feature 1..19: note = RNA
  misc_feature 20..21: note = DNA
cttagcagtcttatctaactt

SEQ ID NO: 1443 - DNA, 21 bp, synthetic construct
  misc_feature 1..21: note = Description of Artificial Sequence: Synthetic oligonucleotide
  source 1..21: mol_type = other DNA
  modified_base 1: mod_base = OTHER; note = 2'-fluoro nucleotide
  modified_base 2: mod_base = OTHER; note = 2'-fluoro nucleotide
  modified_base 3: mod_base = OTHER; note = 2'-O-Methyl nucleotide
  modified_base 4: mod_base = OTHER; note = 2'-fluoro nucleotide
  modified_base 5: mod_base = OTHER; note = 2'-O-Methyl nucleotide
  modified_base 6: mod_base = OTHER; note = 2'-fluoro nucleotide
  modified_base 7: mod_base = OTHER; note = 2'-O-Methyl nucleotide
  modified_base 8: mod_base = OTHER; note = 2'-fluoro nucleotide
  modified_base 9: mod_base = OTHER; note = 2'-O-Methyl nucleotide
  modified_base 10: mod_base = OTHER; note = 2'-fluoro nucleotide
  modified_base 11: mod_base = OTHER; note = 2'-O-Methyl nucleotide
  modified_base 12: mod_base = OTHER; note = 2'-fluoro nucleotide
  modified_base 13: mod_base = OTHER; note = 2'-O-Methyl nucleotide
  modified_base 14: mod_base = OTHER; note = 2'-fluoro nucleotide
  modified_base 15: mod_base = OTHER; note = 2'-O-Methyl nucleotide
  modified_base 16: mod_base = OTHER; note = 2'-fluoro nucleotide
  modified_base 17: mod_base = OTHER; note = 2'-O-Methyl nucleotide
  modified_base 18: mod_base = OTHER; note = 2'-fluoro nucleotide
  modified_base 19: mod_base = OTHER; note = 2'-O-Methyl nucleotide
  modified_base 20: mod_base = OTHER; note = deoxy-thymine phosphorothioate
  misc_feature 1..19: note = RNA
  misc_feature 20..21: note = DNA
gttagataagactgctaagtt

SEQ ID NO: 1444 - DNA, 21 bp, synthetic construct
  misc_feature 1..21: note = Description of Artificial Sequence: Synthetic oligonucleotide
  source 1..21: mol_type = other DNA
  modified_base 1: mod_base = OTHER; note = 2'-O-Methyl nucleotide
  modified_base 2: mod_base = OTHER; note = 2'-O-Methyl nucleotide
  modified_base 3: mod_base = OTHER; note = 2'-fluoro nucleotide
  modified_base 4: mod_base = OTHER; note = 2'-O-Methyl nucleotide
  modified_base 5: mod_base = OTHER; note = 2'-fluoro nucleotide
  modified_base 6: mod_base = OTHER; note = 2'-O-Methyl nucleotide
  modified_base 7: mod_base = OTHER; note = 2'-fluoro nucleotide
  modified_base 8: mod_base = OTHER; note = 2'-O-Methyl nucleotide
  modified_base 9: mod_base = OTHER; note = 2'-fluoro nucleotide
  modified_base 10: mod_base = OTHER; note = 2'-O-Methyl nucleotide
  modified_base 11: mod_base = OTHER; note = 2'-fluoro nucleotide
  modified_base 12: mod_base = OTHER; note = 2'-O-Methyl nucleotide
  modified_base 13: mod_base = OTHER; note = 2'-fluoro nucleotide
  modified_base 14: mod_base = OTHER; note = 2'-O-Methyl nucleotide
  modified_base 15: mod_base = OTHER; note = 2'-fluoro nucleotide
  modified_base 16: mod_base = OTHER; note = 2'-O-Methyl nucleotide
  modified_base 17: mod_base = OTHER; note = 2'-fluoro nucleotide
  modified_base 18: mod_base = OTHER; note = 2'-O-Methyl nucleotide
  modified_base 19: mod_base = OTHER; note = 2'-fluoro nucleotide
  modified_base 20: mod_base = OTHER; note = deoxy-thymine phosphorothioate
  misc_feature 1..19: note = RNA
  misc_feature 20..21: note = DNA
ttagcagtcttatctaacttt

SEQ ID NO: 1445 - DNA, 21 bp, synthetic construct
  misc_feature 1..21: note = Description of Artificial Sequence: Synthetic oligonucleotide
  source 1..21: mol_type = other DNA
  modified_base 1: mod_base = OTHER; note = 2'-fluoro nucleotide
  modified_base 2: mod_base = OTHER; note = 2'-fluoro nucleotide
  modified_base 3: mod_base = OTHER; note = 2'-O-Methyl nucleotide
  modified_base 4: mod_base = OTHER; note = 2'-fluoro nucleotide
  modified_base 5: mod_base = OTHER; note = 2'-O-Methyl nucleotide
  modified_base 6: mod_base = OTHER; note = 2'-fluoro nucleotide
  modified_base 7: mod_base = OTHER; note = 2'-O-Methyl nucleotide
  modified_base 8: mod_base = OTHER; note = 2'-fluoro nucleotide
  modified_base 9: mod_base = OTHER; note = 2'-O-Methyl nucleotide
  modified_base 10: mod_base = OTHER; note = 2'-fluoro nucleotide
  modified_base 11: mod_base = OTHER; note = 2'-O-Methyl nucleotide
  modified_base 12: mod_base = OTHER; note = 2'-fluoro nucleotide
  modified_base 13: mod_base = OTHER; note = 2'-O-Methyl nucleotide
  modified_base 14: mod_base = OTHER; note = 2'-fluoro nucleotide
  modified_base 15: mod_base = OTHER; note = 2'-O-Methyl nucleotide
  modified_base 16: mod_base = OTHER; note = 2'-fluoro nucleotide
  modified_base 17: mod_base = OTHER; note = 2'-O-Methyl nucleotide
  modified_base 18: mod_base = OTHER; note = 2'-fluoro nucleotide
  modified_base 19: mod_base = OTHER; note = 2'-O-Methyl nucleotide
  modified_base 20: mod_base = OTHER; note = deoxy-thymine phosphorothioate
  misc_feature 1..19: note = RNA
  misc_feature 20..21: note = DNA
agttagataagactgctaatt

SEQ ID NO: 1446 - DNA, 21 bp, synthetic construct
  misc_feature 1..21: note = Description of Artificial Sequence: Synthetic oligonucleotide
  source 1..21: mol_type = other DNA
  modified_base 1: mod_base = OTHER; note = 2'-O-Methyl nucleotide
  modified_base 2: mod_base = OTHER; note = 2'-O-Methyl nucleotide
  modified_base 3: mod_base = OTHER; note = 2'-fluoro nucleotide
  modified_base 4: mod_base = OTHER; note = 2'-O-Methyl nucleotide
  modified_base 5: mod_base = OTHER; note = 2'-fluoro nucleotide
  modified_base 6: mod_base = OTHER; note = 2'-O-Methyl nucleotide
  modified_base 7: mod_base = OTHER; note = 2'-fluoro nucleotide
  modified_base 8: mod_base = OTHER; note = 2'-O-Methyl nucleotide
  modified_base 9: mod_base = OTHER; note = 2'-fluoro nucleotide
  modified_base 10: mod_base = OTHER; note = 2'-O-Methyl nucleotide
  modified_base 11: mod_base = OTHER; note = 2'-fluoro nucleotide
  modified_base 12: mod_base = OTHER; note = 2'-O-Methyl nucleotide
  modified_base 13: mod_base = OTHER; note = 2'-fluoro nucleotide
  modified_base 14: mod_base = OTHER; note = 2'-O-Methyl nucleotide
  modified_base 15: mod_base = OTHER; note = 2'-fluoro nucleotide
  modified_base 16: mod_base = OTHER; note = 2'-O-Methyl nucleotide
  modified_base 17: mod_base = OTHER; note = 2'-fluoro nucleotide
  modified_base 18: mod_base = OTHER; note = 2'-O-Methyl nucleotide
  modified_base 19: mod_base = OTHER; note = 2'-fluoro nucleotide
  modified_base 20: mod_base = OTHER; note = deoxy-thymine phosphorothioate
  misc_feature 1..19: note = RNA
  misc_feature 20..21: note = DNA
tagcagtcttatctaactatt

SEQ ID NO: 1447 - DNA, 21 bp, synthetic construct
  misc_feature 1..21: note = Description of Artificial Sequence: Synthetic oligonucleotide
  source 1..21: mol_type = other DNA
  modified_base 1: mod_base = OTHER; note = 2'-fluoro nucleotide
  modified_base 2: mod_base = OTHER; note = 2'-fluoro nucleotide
  modified_base 3: mod_base = OTHER; note = 2'-O-Methyl nucleotide
  modified_base 4: mod_base = OTHER; note = 2'-fluoro nucleotide
  modified_base 5: mod_base = OTHER; note = 2'-O-Methyl nucleotide
  modified_base 6: mod_base = OTHER; note = 2'-fluoro nucleotide
  modified_base 7: mod_base = OTHER; note = 2'-O-Methyl nucleotide
  modified_base 8: mod_base = OTHER; note = 2'-fluoro nucleotide
  modified_base 9: mod_base = OTHER; note = 2'-O-Methyl nucleotide
  modified_base 10: mod_base = OTHER; note = 2'-fluoro nucleotide
  modified_base 11: mod_base = OTHER; note = 2'-O-Methyl nucleotide
  modified_base 12: mod_base = OTHER; note = 2'-fluoro nucleotide
  modified_base 13: mod_base = OTHER; note = 2'-O-Methyl nucleotide
  modified_base 14: mod_base = OTHER; note = 2'-fluoro nucleotide
  modified_base 15: mod_base = OTHER; note = 2'-O-Methyl nucleotide
  modified_base 16: mod_base = OTHER; note = 2'-fluoro nucleotide
  modified_base 17: mod_base = OTHER; note = 2'-O-Methyl nucleotide
  modified_base 18: mod_base = OTHER; note = 2'-fluoro nucleotide
  modified_base 19: mod_base = OTHER; note = 2'-O-Methyl nucleotide
  modified_base 20: mod_base = OTHER; note = deoxy-thymine phosphorothioate
  misc_feature 1..19: note = RNA
  misc_feature 20..21: note = DNA
tagttagataagactgctatt

SEQ ID NO: 1448 - DNA, 21 bp, synthetic construct
  misc_feature 1..21: note = Description of Artificial Sequence: Synthetic oligonucleotide
  source 1..21: mol_type = other DNA
  modified_base 1: mod_base = OTHER; note = 2'-O-Methyl nucleotide
  modified_base 2: mod_base = OTHER; note = 2'-O-Methyl nucleotide
  modified_base 3: mod_base = OTHER; note = 2'-fluoro nucleotide
  modified_base 4: mod_base = OTHER; note = 2'-O-Methyl nucleotide
  modified_base 5: mod_base = OTHER; note = 2'-fluoro nucleotide
  modified_base 6: mod_base = OTHER; note = 2'-O-Methyl nucleotide
  modified_base 7: mod_base = OTHER; note = 2'-fluoro nucleotide
  modified_base 8: mod_base = OTHER; note = 2'-O-Methyl nucleotide
  modified_base 9: mod_base = OTHER; note = 2'-fluoro nucleotide
  modified_base 10: mod_base = OTHER; note = 2'-O-Methyl nucleotide
  modified_base 11: mod_base = OTHER; note = 2'-fluoro nucleotide
  modified_base 12: mod_base = OTHER; note = 2'-O-Methyl nucleotide
  modified_base 13: mod_base = OTHER; note = 2'-fluoro nucleotide
  modified_base 14: mod_base = OTHER; note = 2'-O-Methyl nucleotide
  modified_base 15: mod_base = OTHER; note = 2'-fluoro nucleotide
  modified_base 16: mod_base = OTHER; note = 2'-O-Methyl nucleotide
  modified_base 17: mod_base = OTHER; note = 2'-fluoro nucleotide
  modified_base 18: mod_base = OTHER; note = 2'-O-Methyl nucleotide
  modified_base 19: mod_base = OTHER; note = 2'-fluoro nucleotide
  modified_base 20: mod_base = OTHER; note = deoxy-thymine phosphorothioate
  misc_feature 1..19: note = RNA
  misc_feature 20..21: note = DNA
agcagtcttatctaactattt

SEQ ID NO: 1449 - DNA, 21 bp, synthetic construct
  misc_feature 1..21: note = Description of Artificial Sequence: Synthetic oligonucleotide
  source 1..21: mol_type = other DNA
  modified_base 1: mod_base = OTHER; note = 2'-fluoro nucleotide
  modified_base 2: mod_base = OTHER; note = 2'-fluoro nucleotide
  modified_base 3: mod_base = OTHER; note = 2'-O-Methyl nucleotide
  modified_base 4: mod_base = OTHER; note = 2'-fluoro nucleotide
  modified_base 5: mod_base = OTHER; note = 2'-O-Methyl nucleotide
  modified_base 6: mod_base = OTHER; note = 2'-fluoro nucleotide
  modified_base 7: mod_base = OTHER; note = 2'-O-Methyl nucleotide
  modified_base 8: mod_base = OTHER; note = 2'-fluoro nucleotide
  modified_base 9: mod_base = OTHER; note = 2'-O-Methyl nucleotide
  modified_base 10: mod_base = OTHER; note = 2'-fluoro nucleotide
  modified_base 11: mod_base = OTHER; note = 2'-O-Methyl nucleotide
  modified_base 12: mod_base = OTHER; note = 2'-fluoro nucleotide
  modified_base 13: mod_base = OTHER; note = 2'-O-Methyl nucleotide
  modified_base 14: mod_base = OTHER; note = 2'-fluoro nucleotide
  modified_base 15: mod_base = OTHER; note = 2'-O-Methyl nucleotide
  modified_base 16: mod_base = OTHER; note = 2'-fluoro nucleotide
  modified_base 17: mod_base = OTHER; note = 2'-O-Methyl nucleotide
  modified_base 18: mod_base = OTHER; note = 2'-fluoro nucleotide
  modified_base 19: mod_base = OTHER; note = 2'-O-Methyl nucleotide
  modified_base 20: mod_base = OTHER; note = deoxy-thymine phosphorothioate
  misc_feature 1..19: note = RNA
  misc_feature 20..21: note = DNA
atagttagataagactgcttt

SEQ ID NO: 1450 - DNA, 21 bp, synthetic construct
  misc_feature 1..21: note = Description of Artificial Sequence: Synthetic oligonucleotide
  source 1..21: mol_type = other DNA
  modified_base 1: mod_base = OTHER; note = 2'-O-Methyl nucleotide
  modified_base 2: mod_base = OTHER; note = 2'-O-Methyl nucleotide
  modified_base 3: mod_base = OTHER; note = 2'-fluoro nucleotide
  modified_base 4: mod_base = OTHER; note = 2'-O-Methyl nucleotide
  modified_base 5: mod_base = OTHER; note = 2'-fluoro nucleotide
  modified_base 6: mod_base = OTHER; note = 2'-O-Methyl nucleotide
  modified_base 7: mod_base = OTHER; note = 2'-fluoro nucleotide
  modified_base 8: mod_base = OTHER; note = 2'-O-Methyl nucleotide
  modified_base 9: mod_base = OTHER; note = 2'-fluoro nucleotide
  modified_base 10: mod_base = OTHER; note = 2'-O-Methyl nucleotide
  modified_base 11: mod_base = OTHER; note = 2'-fluoro nucleotide
  modified_base 12: mod_base = OTHER; note = 2'-O-Methyl nucleotide
  modified_base 13: mod_base = OTHER; note = 2'-fluoro nucleotide
  modified_base 14: mod_base = OTHER; note = 2'-O-Methyl nucleotide
  modified_base 15: mod_base = OTHER; note = 2'-fluoro nucleotide
  modified_base 16: mod_base = OTHER; note = 2'-O-Methyl nucleotide
  modified_base 17: mod_base = OTHER; note = 2'-fluoro nucleotide
  modified_base 18: mod_base = OTHER; note = 2'-O-Methyl nucleotide
  modified_base 19: mod_base = OTHER; note = 2'-fluoro nucleotide
  modified_base 20: mod_base = OTHER; note = deoxy-thymine phosphorothioate
  misc_feature 1..19: note = RNA
  misc_feature 20..21: note = DNA
gcagtcttatctaactatgtt

SEQ ID NO: 1451 - DNA, 21 bp, synthetic construct
  misc_feature 1..21: note = Description of Artificial Sequence: Synthetic oligonucleotide
  source 1..21: mol_type = other DNA
  modified_base 1: mod_base = OTHER; note = 2'-fluoro nucleotide
  modified_base 2: mod_base = OTHER; note = 2'-fluoro nucleotide
  modified_base 3: mod_base = OTHER; note = 2'-O-Methyl nucleotide
  modified_base 4: mod_base = OTHER; note = 2'-fluoro nucleotide
  modified_base 5: mod_base = OTHER; note = 2'-O-Methyl nucleotide
  modified_base 6: mod_base = OTHER; note = 2'-fluoro nucleotide
  modified_base 7: mod_base = OTHER; note = 2'-O-Methyl nucleotide
  modified_base 8: mod_base = OTHER; note = 2'-fluoro nucleotide
  modified_base 9: mod_base = OTHER; note = 2'-O-Methyl nucleotide
  modified_base 10: mod_base = OTHER; note = 2'-fluoro nucleotide
  modified_base 11: mod_base = OTHER; note = 2'-O-Methyl nucleotide
  modified_base 12: mod_base = OTHER; note = 2'-fluoro nucleotide
  modified_base 13: mod_base = OTHER; note = 2'-O-Methyl nucleotide
  modified_base 14: mod_base = OTHER; note = 2'-fluoro nucleotide
  modified_base 15: mod_base = OTHER; note = 2'-O-Methyl nucleotide
  modified_base 16: mod_base = OTHER; note = 2'-fluoro nucleotide
  modified_base 17: mod_base = OTHER; note = 2'-O-Methyl nucleotide
  modified_base 18: mod_base = OTHER; note = 2'-fluoro nucleotide
  modified_base 19: mod_base = OTHER; note = 2'-O-Methyl nucleotide
  modified_base 20: mod_base = OTHER; note = deoxy-thymine phosphorothioate
  misc_feature 1..19: note = RNA
  misc_feature 20..21: note = DNA
catagttagataagactgctt

SEQ ID NO: 1452 - DNA, 21 bp, synthetic construct
  misc_feature 1..21: note = Description of Artificial Sequence: Synthetic oligonucleotide
  source 1..21: mol_type = other DNA
  modified_base 1: mod_base = OTHER; note = 2'-O-Methyl nucleotide
  modified_base 2: mod_base = OTHER; note = 2'-O-Methyl nucleotide
  modified_base 3: mod_base = OTHER; note = 2'-fluoro nucleotide
  modified_base 4: mod_base = OTHER; note = 2'-O-Methyl nucleotide
  modified_base 5: mod_base = OTHER; note = 2'-fluoro nucleotide
  modified_base 6: mod_base = OTHER; note = 2'-O-Methyl nucleotide
  modified_base 7: mod_base = OTHER; note = 2'-fluoro nucleotide
  modified_base 8: mod_base = OTHER; note = 2'-O-Methyl nucleotide
  modified_base 9: mod_base = OTHER; note = 2'-fluoro nucleotide
  modified_base 10: mod_base = OTHER; note = 2'-O-Methyl nucleotide
  modified_base 11: mod_base = OTHER; note = 2'-fluoro nucleotide
  modified_base 12: mod_base = OTHER; note = 2'-O-Methyl nucleotide
  modified_base 13: mod_base = OTHER; note = 2'-fluoro nucleotide
  modified_base 14: mod_base = OTHER; note = 2'-O-Methyl nucleotide
  modified_base 15: mod_base = OTHER; note = 2'-fluoro nucleotide
  modified_base 16: mod_base = OTHER; note = 2'-O-Methyl nucleotide
  modified_base 17: mod_base = OTHER; note = 2'-fluoro nucleotide
  modified_base 18: mod_base = OTHER; note = 2'-O-Methyl nucleotide
  modified_base 19: mod_base = OTHER; note = 2'-fluoro nucleotide
  modified_base 20: mod_base = OTHER; note = deoxy-thymine phosphorothioate
  misc_feature 1..19: note = RNA
  misc_feature 20..21: note = DNA
cagtcttatctaactatgatt

SEQ ID NO: 1453 - DNA, 21 bp, synthetic construct
  misc_feature 1..21: note = Description of Artificial Sequence: Synthetic oligonucleotide
  source 1..21: mol_type = other DNA
  modified_base 1: mod_base = OTHER; note = 2'-fluoro nucleotide
  modified_base 2: mod_base = OTHER; note = 2'-fluoro nucleotide
  modified_base 3: mod_base = OTHER; note = 2'-O-Methyl nucleotide
  modified_base 4: mod_base = OTHER; note = 2'-fluoro nucleotide
  modified_base 5: mod_base = OTHER; note = 2'-O-Methyl nucleotide
  modified_base 6: mod_base = OTHER; note = 2'-fluoro nucleotide
  modified_base 7: mod_base = OTHER; note = 2'-O-Methyl nucleotide
  modified_base 8: mod_base = OTHER; note = 2'-fluoro nucleotide
  modified_base 9: mod_base = OTHER; note = 2'-O-Methyl nucleotide
  modified_base 10: mod_base = OTHER; note = 2'-fluoro nucleotide
  modified_base 11: mod_base = OTHER; note = 2'-O-Methyl nucleotide
  modified_base 12: mod_base = OTHER; note = 2'-fluoro nucleotide
  modified_base 13: mod_base = OTHER; note = 2'-O-Methyl nucleotide
  modified_base 14: mod_base = OTHER; note = 2'-fluoro nucleotide
  modified_base 15: mod_base = OTHER; note = 2'-O-Methyl nucleotide
  modified_base 16: mod_base = OTHER; note = 2'-fluoro nucleotide
  modified_base 17: mod_base = OTHER; note = 2'-O-Methyl nucleotide
  modified_base 18: mod_base = OTHER; note = 2'-fluoro nucleotide
  modified_base 19: mod_base = OTHER; note = 2'-O-Methyl nucleotide
  modified_base 20: mod_base = OTHER; note = deoxy-thymine phosphorothioate
  misc_feature 1..19: note = RNA
  misc_feature 20..21: note = DNA
tcatagttagataagactgtt

SEQ ID NO: 1454 - DNA, 21 bp, synthetic construct
  misc_feature 1..21: note = Description of Artificial Sequence: Synthetic oligonucleotide
  source 1..21: mol_type = other DNA
  modified_base 1: mod_base = OTHER; note = 2'-O-Methyl nucleotide
  modified_base 2: mod_base = OTHER; note = 2'-O-Methyl nucleotide
  modified_base 3: mod_base = OTHER; note = 2'-fluoro nucleotide
  modified_base 4: mod_base = OTHER; note = 2'-O-Methyl nucleotide
  modified_base 5: mod_base = OTHER; note = 2'-fluoro nucleotide
  modified_base 6: mod_base = OTHER; note = 2'-O-Methyl nucleotide
  modified_base 7: mod_base = OTHER; note = 2'-fluoro nucleotide
  modified_base 8: mod_base = OTHER; note = 2'-O-Methyl nucleotide
  modified_base 9: mod_base = OTHER; note = 2'-fluoro nucleotide
  modified_base 10: mod_base = OTHER; note = 2'-O-Methyl nucleotide
  modified_base 11: mod_base = OTHER; note = 2'-fluoro nucleotide
  modified_base 12: mod_base = OTHER; note = 2'-O-Methyl nucleotide
  modified_base 13: mod_base = OTHER; note = 2'-fluoro nucleotide
  modified_base 14: mod_base = OTHER; note = 2'-O-Methyl nucleotide
  modified_base 15: mod_base = OTHER; note = 2'-fluoro nucleotide
  modified_base 16: mod_base = OTHER; note = 2'-O-Methyl nucleotide
  modified_base 17: mod_base = OTHER; note = 2'-fluoro nucleotide
  modified_base 18: mod_base = OTHER; note = 2'-O-Methyl nucleotide
  modified_base 19: mod_base = OTHER; note = 2'-fluoro nucleotide
  modified_base 20: mod_base = OTHER; note = deoxy-thymine phosphorothioate
  misc_feature 1..19: note = RNA
  misc_feature 20..21: note = DNA
tcttatctaactatgatgctt

SEQ ID NO: 1455 - DNA, 21 bp, synthetic construct
  misc_feature 1..21: note = Description of Artificial Sequence: Synthetic oligonucleotide
  source 1..21: mol_type = other DNA
  modified_base 1: mod_base = OTHER; note = 2'-fluoro nucleotide
  modified_base 2: mod_base = OTHER; note = 2'-fluoro nucleotide
  modified_base 3: mod_base = OTHER; note = 2'-O-Methyl nucleotide
  modified_base 4: mod_base = OTHER; note = 2'-fluoro nucleotide
  modified_base 5: mod_base = OTHER; note = 2'-O-Methyl nucleotide
  modified_base 6: mod_base = OTHER; note = 2'-fluoro nucleotide
  modified_base 7: mod_base = OTHER; note = 2'-O-Methyl nucleotide
  modified_base 8: mod_base = OTHER; note = 2'-fluoro nucleotide
  modified_base 9: mod_base = OTHER; note = 2'-O-Methyl nucleotide
  modified_base 10: mod_base = OTHER; note = 2'-fluoro nucleotide
  modified_base 11: mod_base = OTHER; note = 2'-O-Methyl nucleotide
  modified_base 12: mod_base = OTHER; note = 2'-fluoro nucleotide
  modified_base 13: mod_base = OTHER; note = 2'-O-Methyl nucleotide
  modified_base 14: mod_base = OTHER; note = 2'-fluoro nucleotide
  modified_base 15: mod_base = OTHER; note = 2'-O-Methyl nucleotide
  modified_base 16: mod_base = OTHER; note = 2'-fluoro nucleotide
  modified_base 17: mod_base = OTHER; note = 2'-O-Methyl nucleotide
  modified_base 18: mod_base = OTHER; note = 2'-fluoro nucleotide
  modified_base 19: mod_base = OTHER; note = 2'-O-Methyl nucleotide
  modified_base 20: mod_base = OTHER; note = deoxy-thymine phosphorothioate
  misc_feature 1..19: note = RNA
  misc_feature 20..21: note = DNA
gcatcatagttagataagatt

SEQ ID NO: 1456 - DNA, 21 bp, synthetic construct
  misc_feature 1..21: note = Description of Artificial Sequence: Synthetic oligonucleotide
  source 1..21: mol_type = other DNA
  modified_base 1: mod_base = OTHER; note = 2'-O-Methyl nucleotide
  modified_base 2: mod_base = OTHER; note = 2'-O-Methyl nucleotide
  modified_base 3: mod_base = OTHER; note = 2'-fluoro nucleotide
  modified_base 4: mod_base = OTHER; note = 2'-O-Methyl nucleotide
  modified_base 5: mod_base = OTHER; note = 2'-fluoro nucleotide
  modified_base 6: mod_base = OTHER; note = 2'-O-Methyl nucleotide
  modified_base 7: mod_base = OTHER; note = 2'-fluoro nucleotide
  modified_base 8: mod_base = OTHER; note = 2'-O-Methyl nucleotide
  modified_base 9: mod_base = OTHER; note = 2'-fluoro nucleotide
  modified_base 10: mod_base = OTHER; note = 2'-O-Methyl nucleotide
  modified_base 11: mod_base = OTHER; note = 2'-fluoro nucleotide
  modified_base 12: mod_base = OTHER; note = 2'-O-Methyl nucleotide
  modified_base 13: mod_base = OTHER; note = 2'-fluoro nucleotide
  modified_base 14: mod_base = OTHER; note = 2'-O-Methyl nucleotide
  modified_base 15: mod_base = OTHER; note = 2'-fluoro nucleotide
  modified_base 16: mod_base = OTHER; note = 2'-O-Methyl nucleotide
  modified_base 17: mod_base = OTHER; note = 2'-fluoro nucleotide
  modified_base 18: mod_base = OTHER; note = 2'-O-Methyl nucleotide
  modified_base 19: mod_base = OTHER; note = 2'-fluoro nucleotide
  modified_base 20: mod_base = OTHER; note = deoxy-thymine phosphorothioate
  misc_feature 1..19: note = RNA
  misc_feature 20..21: note = DNA
cttatctaactatgatgcatt

SEQ ID NO: 1457 - DNA, 21 bp, synthetic construct
  misc_feature 1..21: note = Description of Artificial Sequence: Synthetic oligonucleotide
  source 1..21: mol_type = other DNA
  modified_base 1: mod_base = OTHER; note = 2'-fluoro nucleotide
  modified_base 2: mod_base = OTHER; note = 2'-fluoro nucleotide
  modified_base 3: mod_base = OTHER; note = 2'-O-Methyl nucleotide
  modified_base 4: mod_base = OTHER; note = 2'-fluoro nucleotide
  modified_base 5: mod_base = OTHER; note = 2'-O-Methyl nucleotide
  modified_base 6: mod_base = OTHER; note = 2'-fluoro nucleotide
  modified_base 7: mod_base = OTHER; note = 2'-O-Methyl nucleotide
  modified_base 8: mod_base = OTHER; note = 2'-fluoro nucleotide
  modified_base 9: mod_base = OTHER; note = 2'-O-Methyl nucleotide
  modified_base 10: mod_base = OTHER; note = 2'-fluoro nucleotide
  modified_base 11: mod_base = OTHER; note = 2'-O-Methyl nucleotide
  modified_base 12: mod_base = OTHER; note = 2'-fluoro nucleotide
  modified_base 13: mod_base = OTHER; note = 2'-O-Methyl nucleotide
  modified_base 14: mod_base = OTHER; note = 2'-fluoro nucleotide
  modified_base 15: mod_base = OTHER; note = 2'-O-Methyl nucleotide
  modified_base 16: mod_base = OTHER; note = 2'-fluoro nucleotide
  modified_base 17: mod_base = OTHER; note = 2'-O-Methyl nucleotide
  modified_base 18: mod_base = OTHER; note = 2'-fluoro nucleotide
  modified_base 19: mod_base = OTHER; note = 2'-O-Methyl nucleotide
  modified_base 20: mod_base = OTHER; note = deoxy-thymine phosphorothioate
  misc_feature 1..19: note = RNA
  misc_feature 20..21: note = DNA
tgcatcatagttagataagtt

SEQ ID NO: 1458 - DNA, 21 bp, synthetic construct
  misc_feature 1..21: note = Description of Artificial Sequence: Synthetic oligonucleotide
  source 1..21: mol_type = other DNA
  modified_base 1: mod_base = OTHER; note = 2'-O-Methyl nucleotide
  modified_base 2: mod_base = OTHER; note = 2'-O-Methyl nucleotide
  modified_base 3: mod_base = OTHER; note = 2'-fluoro nucleotide
  modified_base 4: mod_base = OTHER; note = 2'-O-Methyl nucleotide
  modified_base 5: mod_base = OTHER; note = 2'-fluoro nucleotide
  modified_base 6: mod_base = OTHER; note = 2'-O-Methyl nucleotide
  modified_base 7: mod_base = OTHER; note = 2'-fluoro nucleotide
  modified_base 8: mod_base = OTHER; note = 2'-O-Methyl nucleotide
  modified_base 9: mod_base = OTHER; note = 2'-fluoro nucleotide
  modified_base 10: mod_base = OTHER; note = 2'-O-Methyl nucleotide
  modified_base 11: mod_base = OTHER; note = 2'-fluoro nucleotide
  modified_base 12: mod_base = OTHER; note = 2'-O-Methyl nucleotide
  modified_base 13: mod_base = OTHER; note = 2'-fluoro nucleotide
  modified_base 14: mod_base = OTHER; note = 2'-O-Methyl nucleotide
  modified_base 15: mod_base = OTHER; note = 2'-fluoro nucleotide
  modified_base 16: mod_base = OTHER; note = 2'-O-Methyl nucleotide
  modified_base 17: mod_base = OTHER; note = 2'-fluoro nucleotide
  modified_base 18: mod_base = OTHER; note = 2'-O-Methyl nucleotide
  modified_base 19: mod_base = OTHER; note = 2'-fluoro nucleotide
  modified_base 20: mod_base = OTHER; note = deoxy-thymine phosphorothioate
  misc_feature 1..19: note = RNA
  misc_feature 20..21: note = DNA
ttatctaactatgatgcaatt

SEQ ID NO: 1459 - DNA, 21 bp, synthetic construct
  misc_feature 1..21: note = Description of Artificial Sequence: Synthetic oligonucleotide
  source 1..21: mol_type = other DNA
  modified_base 1: mod_base = OTHER; note = 2'-fluoro nucleotide
  modified_base 2: mod_base = OTHER; note = 2'-fluoro nucleotide
  modified_base 3: mod_base = OTHER; note = 2'-O-Methyl nucleotide
  modified_base 4: mod_base = OTHER; note = 2'-fluoro nucleotide
  modified_base 5: mod_base = OTHER; note = 2'-O-Methyl nucleotide
  modified_base 6: mod_base = OTHER; note = 2'-fluoro nucleotide
  modified_base 7: mod_base = OTHER; note = 2'-O-Methyl nucleotide
  modified_base 8: mod_base = OTHER; note = 2'-fluoro nucleotide
  modified_base 9: mod_base = OTHER; note = 2'-O-Methyl nucleotide
  modified_base 10: mod_base = OTHER; note = 2'-fluoro nucleotide
  modified_base 11: mod_base = OTHER; note = 2'-O-Methyl nucleotide
  modified_base 12: mod_base = OTHER; note = 2'-fluoro nucleotide
  modified_base 13: mod_base = OTHER; note = 2'-O-Methyl nucleotide
  modified_base 14: mod_base = OTHER; note = 2'-fluoro nucleotide
  modified_base 15: mod_base = OTHER; note = 2'-O-Methyl nucleotide
  modified_base 16: mod_base = OTHER; note = 2'-fluoro nucleotide
  modified_base 17: mod_base = OTHER; note = 2'-O-Methyl nucleotide
  modified_base 18: mod_base = OTHER; note = 2'-fluoro nucleotide
  modified_base 19: mod_base = OTHER; note = 2'-O-Methyl nucleotide
  modified_base 20: mod_base = OTHER; note = deoxy-thymine phosphorothioate
  misc_feature 1..19: note = RNA
  misc_feature 20..21: note = DNA
ttgcatcatagttagataatt

SEQ ID NO: 1460 - DNA, 21 bp, synthetic construct
  misc_feature 1..21: note = Description of Artificial Sequence: Synthetic oligonucleotide
  source 1..21: mol_type = other DNA
  modified_base 1: mod_base = OTHER; note = 2'-O-Methyl nucleotide
  modified_base 2: mod_base = OTHER; note = 2'-O-Methyl nucleotide
  modified_base 3: mod_base = OTHER; note = 2'-fluoro nucleotide
  modified_base 4: mod_base = OTHER; note = 2'-O-Methyl nucleotide
  modified_base 5: mod_base = OTHER; note = 2'-fluoro nucleotide
  modified_base 6: mod_base = OTHER; note = 2'-O-Methyl nucleotide
  modified_base 7: mod_base = OTHER; note = 2'-fluoro nucleotide
  modified_base 8: mod_base = OTHER; note = 2'-O-Methyl nucleotide
  modified_base 9: mod_base = OTHER; note = 2'-fluoro nucleotide
  modified_base 10: mod_base = OTHER; note = 2'-O-Methyl nucleotide
  modified_base 11: mod_base = OTHER; note = 2'-fluoro nucleotide
  modified_base 12: mod_base = OTHER; note = 2'-O-Methyl nucleotide
  modified_base 13: mod_base = OTHER; note = 2'-fluoro nucleotide
  modified_base 14: mod_base = OTHER; note = 2'-O-Methyl nucleotide
  modified_base 15: mod_base = OTHER; note = 2'-fluoro nucleotide
  modified_base 16: mod_base = OTHER; note = 2'-O-Methyl nucleotide
  modified_base 17: mod_base = OTHER; note = 2'-fluoro nucleotide
  modified_base 18: mod_base = OTHER; note = 2'-O-Methyl nucleotide
  modified_base 19: mod_base = OTHER; note = 2'-fluoro nucleotide
  modified_base 20: mod_base = OTHER; note = deoxy-thymine phosphorothioate
  misc_feature 1..19: note = RNA
  misc_feature 20..21: note = DNA
tatctaactatgatgcaaatt

SEQ ID NO: 1461 - DNA, 21 bp, synthetic construct
  misc_feature 1..21: note = Description of Artificial Sequence: Synthetic oligonucleotide
  source 1..21: mol_type = other DNA
  modified_base 1: mod_base = OTHER; note = 2'-fluoro nucleotide
  modified_base 2: mod_base = OTHER; note = 2'-fluoro nucleotide
  modified_base 3: mod_base = OTHER; note = 2'-O-Methyl nucleotide
  modified_base 4: mod_base = OTHER; note = 2'-fluoro nucleotide
  modified_base 5: mod_base = OTHER; note = 2'-O-Methyl nucleotide
  modified_base 6: mod_base = OTHER; note = 2'-fluoro nucleotide
  modified_base 7: mod_base = OTHER; note = 2'-O-Methyl nucleotide
  modified_base 8: mod_base = OTHER; note = 2'-fluoro nucleotide
  modified_base 9: mod_base = OTHER; note = 2'-O-Methyl nucleotide
  modified_base 10: mod_base = OTHER; note = 2'-fluoro nucleotide
  modified_base 11: mod_base = OTHER; note = 2'-O-Methyl nucleotide
  modified_base 12: mod_base = OTHER; note = 2'-fluoro nucleotide
  modified_base 13: mod_base = OTHER; note = 2'-O-Methyl nucleotide
  modified_base 14: mod_base = OTHER; note = 2'-fluoro nucleotide
  modified_base 15: mod_base = OTHER; note = 2'-O-Methyl nucleotide
  modified_base 16: mod_base = OTHER; note = 2'-fluoro nucleotide
  modified_base 17: mod_base = OTHER; note = 2'-O-Methyl nucleotide
  modified_base 18: mod_base = OTHER; note = 2'-fluoro nucleotide
  modified_base 19: mod_base = OTHER; note = 2'-O-Methyl nucleotide
  modified_base 20: mod_base = OTHER; note = deoxy-thymine phosphorothioate
  misc_feature 1..19: note = RNA
  misc_feature 20..21: note = DNA
tttgcatcatagttagatatt

SEQ ID NO: 1462 - DNA, 21 bp, synthetic construct
  misc_feature 1..21: note = Description of Artificial Sequence: Synthetic oligonucleotide
  source 1..21: mol_type = other DNA
  modified_base 1: mod_base = OTHER; note = 2'-O-Methyl nucleotide
  modified_base 2: mod_base = OTHER; note = 2'-O-Methyl nucleotide
  modified_base 3: mod_base = OTHER; note = 2'-fluoro nucleotide
  modified_base 4: mod_base = OTHER; note = 2'-O-Methyl nucleotide
  modified_base 5: mod_base = OTHER; note = 2'-fluoro nucleotide
  modified_base 6: mod_base = OTHER; note = 2'-O-Methyl nucleotide
  modified_base 7: mod_base = OTHER; note = 2'-fluoro nucleotide
  modified_base 8: mod_base = OTHER; note = 2'-O-Methyl nucleotide
  modified_base 9: mod_base = OTHER; note = 2'-fluoro nucleotide
  modified_base 10: mod_base = OTHER; note = 2'-O-Methyl nucleotide
  modified_base 11: mod_base = OTHER; note = 2'-fluoro nucleotide
  modified_base 12: mod_base = OTHER; note = 2'-O-Methyl nucleotide
  modified_base 13: mod_base = OTHER; note = 2'-fluoro nucleotide
  modified_base 14: mod_base = OTHER; note = 2'-O-Methyl nucleotide
  modified_base 15: mod_base = OTHER; note = 2'-fluoro nucleotide
  modified_base 16: mod_base = OTHER; note = 2'-O-Methyl nucleotide
  modified_base 17: mod_base = OTHER; note = 2'-fluoro nucleotide
  modified_base 18: mod_base = OTHER; note = 2'-O-Methyl nucleotide
  modified_base 19: mod_base = OTHER; note = 2'-fluoro nucleotide
  modified_base 20: mod_base = OTHER; note = deoxy-thymine phosphorothioate
  misc_feature 1..19: note = RNA
  misc_feature 20..21: note = DNA
atctaactatgatgcaaattt

SEQ ID NO: 1463 - DNA, 21 bp, synthetic construct
  misc_feature 1..21: note = Description of Artificial Sequence: Synthetic oligonucleotide
  source 1..21: mol_type = other DNA
  modified_base 1: mod_base = OTHER; note = 2'-fluoro nucleotide
  modified_base 2: mod_base = OTHER; note = 2'-fluoro nucleotide
  modified_base 3: mod_base = OTHER; note = 2'-O-Methyl nucleotide
  modified_base 4: mod_base = OTHER; note = 2'-fluoro nucleotide
  modified_base 5: mod_base = OTHER; note = 2'-O-Methyl nucleotide
  modified_base 6: mod_base = OTHER; note = 2'-fluoro nucleotide
  modified_base 7: mod_base = OTHER; note = 2'-O-Methyl nucleotide
  modified_base 8: mod_base = OTHER; note = 2'-fluoro nucleotide
  modified_base 9: mod_base = OTHER; note = 2'-O-Methyl nucleotide
  modified_base 10: mod_base = OTHER; note = 2'-fluoro nucleotide
  modified_base 11: mod_base = OTHER; note = 2'-O-Methyl nucleotide
  modified_base 12: mod_base = OTHER; note = 2'-fluoro nucleotide
  modified_base 13: mod_base = OTHER; note = 2'-O-Methyl nucleotide
  modified_base 14: mod_base = OTHER; note = 2'-fluoro nucleotide
  modified_base 15: mod_base = OTHER; note = 2'-O-Methyl nucleotide
  modified_base 16: mod_base = OTHER; note = 2'-fluoro nucleotide
  modified_base 17: mod_base = OTHER; note = 2'-O-Methyl nucleotide
  modified_base 18: mod_base = OTHER; note = 2'-fluoro nucleotide
  modified_base 19: mod_base = OTHER; note = 2'-O-Methyl nucleotide
  modified_base 20: mod_base = OTHER; note = deoxy-thymine phosphorothioate
  misc_feature 1..19: note = RNA
  misc_feature 20..21: note = DNA
atttgcatcatagttagattt

SEQ ID NO: 1464 - DNA, 21 bp, synthetic construct
  misc_feature 1..21: note = Description of Artificial Sequence: Synthetic oligonucleotide
  source 1..21: mol_type = other DNA
  modified_base 1: mod_base = OTHER; note = 2'-O-Methyl nucleotide
  modified_base 2: mod_base = OTHER; note = 2'-O-Methyl nucleotide
  modified_base 3: mod_base = OTHER; note = 2'-fluoro nucleotide
  modified_base 4: mod_base = OTHER; note = 2'-O-Methyl nucleotide
  modified_base 5: mod_base = OTHER; note = 2'-fluoro nucleotide
  modified_base 6: mod_base = OTHER; note = 2'-O-Methyl nucleotide
  modified_base 7: mod_base = OTHER; note = 2'-fluoro nucleotide
  modified_base 8: mod_base = OTHER; note = 2'-O-Methyl nucleotide
  modified_base 9: mod_base = OTHER; note = 2'-fluoro nucleotide
  modified_base 10: mod_base = OTHER; note = 2'-O-Methyl nucleotide
  modified_base 11: mod_base = OTHER; note = 2'-fluoro nucleotide
  modified_base 12: mod_base = OTHER; note = 2'-O-Methyl nucleotide
  modified_base 13: mod_base = OTHER; note = 2'-fluoro nucleotide
  modified_base 14: mod_base = OTHER; note = 2'-O-Methyl nucleotide
  modified_base 15: mod_base = OTHER; note = 2'-fluoro nucleotide
  modified_base 16: mod_base = OTHER; note = 2'-O-Methyl nucleotide
  modified_base 17: mod_base = OTHER; note = 2'-fluoro nucleotide
  modified_base 18: mod_base = OTHER; note = 2'-O-Methyl nucleotide
  modified_base 19: mod_base = OTHER; note = 2'-fluoro nucleotide
  modified_base 20: mod_base = OTHER; note = deoxy-thymine phosphorothioate
  misc_feature 1..19: note = RNA
  misc_feature 20..21: note = DNA
tctaactatgatgcaaatatt

SEQ ID NO: 1465 - DNA, 21 bp, synthetic construct
  misc_feature 1..21: note = Description of Artificial Sequence: Synthetic oligonucleotide
  source 1..21: mol_type = other DNA
  modified_base 1: mod_base = OTHER; note = 2'-fluoro nucleotide
  modified_base 2: mod_base = OTHER; note = 2'-fluoro nucleotide
  modified_base 3: mod_base = OTHER; note = 2'-O-Methyl nucleotide
  modified_base 4: mod_base = OTHER; note = 2'-fluoro nucleotide
  modified_base 5: mod_base = OTHER; note = 2'-O-Methyl nucleotide
  modified_base 6: mod_base = OTHER; note = 2'-fluoro nucleotide
  modified_base 7: mod_base = OTHER; note = 2'-O-Methyl nucleotide
  modified_base 8: mod_base = OTHER; note = 2'-fluoro nucleotide
  modified_base 9: mod_base = OTHER; note = 2'-O-Methyl nucleotide
  modified_base 10: mod_base = OTHER; note = 2'-fluoro nucleotide
  modified_base 11: mod_base = OTHER; note = 2'-O-Methyl nucleotide
  modified_base 12: mod_base = OTHER; note = 2'-fluoro nucleotide
  modified_base 13: mod_base = OTHER; note = 2'-O-Methyl nucleotide
  modified_base 14: mod_base = OTHER; note = 2'-fluoro nucleotide
  modified_base 15: mod_base = OTHER; note = 2'-O-Methyl nucleotide
  modified_base 16: mod_base = OTHER; note = 2'-fluoro nucleotide
  modified_base 17: mod_base = OTHER; note = 2'-O-Methyl nucleotide
  modified_base 18: mod_base = OTHER; note = 2'-fluoro nucleotide
  modified_base 19: mod_base = OTHER; note = 2'-O-Methyl nucleotide
  modified_base 20: mod_base = OTHER; note = deoxy-thymine phosphorothioate
  misc_feature 1..19: note = RNA
  misc_feature 20..21: note = DNA
tatttgcatcatagttagatt

SEQ ID NO: 1466 - DNA, 21 bp, synthetic construct
  misc_feature 1..21: note = Description of Artificial Sequence: Synthetic oligonucleotide
  source 1..21: mol_type = other DNA
  modified_base 1: mod_base = OTHER; note = 2'-O-Methyl nucleotide
  modified_base 2: mod_base = OTHER; note = 2'-O-Methyl nucleotide
  modified_base 3: mod_base = OTHER; note = 2'-fluoro nucleotide
  modified_base 4: mod_base = OTHER; note = 2'-O-Methyl nucleotide
  modified_base 5: mod_base = OTHER; note = 2'-fluoro nucleotide
  modified_base 6: mod_base = OTHER; note = 2'-O-Methyl nucleotide
  modified_base 7: mod_base = OTHER; note = 2'-fluoro nucleotide
  modified_base 8: mod_base = OTHER; note = 2'-O-Methyl nucleotide
  modified_base 9: mod_base = OTHER; note = 2'-fluoro nucleotide
  modified_base 10: mod_base = OTHER; note = 2'-O-Methyl nucleotide
  modified_base 11: mod_base = OTHER; note = 2'-fluoro nucleotide
  modified_base 12: mod_base = OTHER; note = 2'-O-Methyl nucleotide
  modified_base 13: mod_base = OTHER; note = 2'-fluoro nucleotide
  modified_base 14: mod_base = OTHER; note = 2'-O-Methyl nucleotide
  modified_base 15: mod_base = OTHER; note = 2'-fluoro nucleotide
  modified_base 16: mod_base = OTHER; note = 2'-O-Methyl nucleotide
  modified_base 17: mod_base = OTHER; note = 2'-fluoro nucleotide
  modified_base 18: mod_base = OTHER; note = 2'-O-Methyl nucleotide
  modified_base 19: mod_base = OTHER; note = 2'-fluoro nucleotide
  modified_base 20: mod_base = OTHER; note = deoxy-thymine phosphorothioate
  misc_feature 1..19: note = RNA
  misc_feature 20..21: note = DNA
ctaactatgatgcaaataatt

SEQ ID NO: 1467 - DNA, 21 bp, synthetic construct
  misc_feature 1..21: note = Description of Artificial Sequence: Synthetic oligonucleotide
  source 1..21: mol_type = other DNA
  modified_base 1: mod_base = OTHER; note = 2'-fluoro nucleotide
  modified_base 2: mod_base = OTHER; note = 2'-fluoro nucleotide
  modified_base 3: mod_base = OTHER; note = 2'-O-Methyl nucleotide
  modified_base 4: mod_base = OTHER; note = 2'-fluoro nucleotide
  modified_base 5: mod_base = OTHER; note = 2'-O-Methyl nucleotide
  modified_base 6: mod_base = OTHER; note = 2'-fluoro nucleotide
  modified_base 7: mod_base = OTHER; note = 2'-O-Methyl nucleotide
  modified_base 8: mod_base = OTHER; note = 2'-fluoro nucleotide
  modified_base 9: mod_base = OTHER; note = 2'-O-Methyl nucleotide
  modified_base 10: mod_base = OTHER; note = 2'-fluoro nucleotide
  modified_base 11: mod_base = OTHER; note = 2'-O-Methyl nucleotide
  modified_base 12: mod_base = OTHER; note = 2'-fluoro nucleotide
  modified_base 13: mod_base = OTHER; note = 2'-O-Methyl nucleotide
  modified_base 14: mod_base = OTHER; note = 2'-fluoro nucleotide
  modified_base 15: mod_base = OTHER; note = 2'-O-Methyl nucleotide
  modified_base 16: mod_base = OTHER; note = 2'-fluoro nucleotide
  modified_base 17: mod_base = OTHER; note = 2'-O-Methyl nucleotide
  modified_base 18: mod_base = OTHER; note = 2'-fluoro nucleotide
  modified_base 19: mod_base = OTHER; note = 2'-O-Methyl nucleotide
  modified_base 20: mod_base = OTHER; note = deoxy-thymine phosphorothioate
  misc_feature 1..19: note = RNA
  misc_feature 20..21: note = DNA
ttatttgcatcatagttagtt

SEQ ID NO: 1468 - DNA, 21 bp, synthetic construct
  misc_feature 1..21: note = Description of Artificial Sequence: Synthetic oligonucleotide
  source 1..21: mol_type = other DNA
  modified_base 1: mod_base = OTHER; note = 2'-O-Methyl nucleotide
  modified_base 2: mod_base = OTHER; note = 2'-O-Methyl nucleotide
  modified_base 3: mod_base = OTHER; note = 2'-fluoro nucleotide
  modified_base 4: mod_base = OTHER; note = 2'-O-Methyl nucleotide
  modified_base 5: mod_base = OTHER; note = 2'-fluoro nucleotide
  modified_base 6: mod_base = OTHER; note = 2'-O-Methyl nucleotide
  modified_base 7: mod_base = OTHER; note = 2'-fluoro nucleotide
  modified_base 8: mod_base = OTHER; note = 2'-O-Methyl nucleotide
  modified_base 9: mod_base = OTHER; note = 2'-fluoro nucleotide
  modified_base 10: mod_base = OTHER; note = 2'-O-Methyl nucleotide
  modified_base 11: mod_base = OTHER; note = 2'-fluoro nucleotide
  modified_base 12: mod_base = OTHER; note = 2'-O-Methyl nucleotide
  modified_base 13: mod_base = OTHER; note = 2'-fluoro nucleotide
  modified_base 14: mod_base = OTHER; note = 2'-O-Methyl nucleotide
  modified_base 15: mod_base = OTHER; note = 2'-fluoro nucleotide
  modified_base 16: mod_base = OTHER; note = 2'-O-Methyl nucleotide
  modified_base 17: mod_base = OTHER; note = 2'-fluoro nucleotide
  modified_base 18: mod_base = OTHER; note = 2'-O-Methyl nucleotide
  modified_base 19: mod_base = OTHER; note = 2'-fluoro nucleotide
  modified_base 20: mod_base = OTHER; note = deoxy-thymine phosphorothioate
  misc_feature 1..19: note = RNA
  misc_feature 20..21: note = DNA
aactatgatgcaaataaaatt

SEQ ID NO: 1469 - DNA, 21 bp, synthetic construct
  misc_feature 1..21: note = Description of Artificial Sequence: Synthetic oligonucleotide
  source 1..21: mol_type = other DNA
  modified_base 1: mod_base = OTHER; note = 2'-fluoro nucleotide
  modified_base 2: mod_base = OTHER; note = 2'-fluoro nucleotide
  modified_base 3: mod_base = OTHER; note = 2'-O-Methyl nucleotide
  modified_base 4: mod_base = OTHER; note = 2'-fluoro nucleotide
  modified_base 5: mod_base = OTHER; note = 2'-O-Methyl nucleotide
  modified_base 6: mod_base = OTHER; note = 2'-fluoro nucleotide
  modified_base 7: mod_base = OTHER; note = 2'-O-Methyl nucleotide
  modified_base 8: mod_base = OTHER; note = 2'-fluoro nucleotide
  modified_base 9: mod_base = OTHER; note = 2'-O-Methyl nucleotide
  modified_base 10: mod_base = OTHER; note = 2'-fluoro nucleotide
  modified_base 11: mod_base = OTHER; note = 2'-O-Methyl nucleotide
  modified_base 12: mod_base = OTHER; note = 2'-fluoro nucleotide
  modified_base 13: mod_base = OTHER; note = 2'-O-Methyl nucleotide
  modified_base 14: mod_base = OTHER; note = 2'-fluoro nucleotide
  modified_base 15: mod_base = OTHER; note = 2'-O-Methyl nucleotide
  modified_base 16: mod_base = OTHER; note = 2'-fluoro nucleotide
  modified_base 17: mod_base = OTHER; note = 2'-O-Methyl nucleotide
  modified_base 18: mod_base = OTHER; note = 2'-fluoro nucleotide
  modified_base 19: mod_base = OTHER; note = 2'-O-Methyl nucleotide
  modified_base 20: mod_base = OTHER; note = deoxy-thymine phosphorothioate
  misc_feature 1..19: note = RNA
  misc_feature 20..21: note = DNA
ttttatttgcatcatagtttt

SEQ ID NO: 1470 - DNA, 21 bp, synthetic construct
  misc_feature 1..21: note = Description of Artificial Sequence: Synthetic oligonucleotide
  source 1..21: mol_type = other DNA
  modified_base 1: mod_base = OTHER; note = 2'-O-Methyl nucleotide
  modified_base 2: mod_base = OTHER; note = 2'-O-Methyl nucleotide
  modified_base 3: mod_base = OTHER; note = 2'-fluoro nucleotide
  modified_base 4: mod_base = OTHER; note = 2'-O-Methyl nucleotide
  modified_base 5: mod_base = OTHER; note = 2'-fluoro nucleotide
  modified_base 6: mod_base = OTHER; note = 2'-O-Methyl nucleotide
  modified_base 7: mod_base = OTHER; note = 2'-fluoro nucleotide
  modified_base 8: mod_base = OTHER; note = 2'-O-Methyl nucleotide
  modified_base 9: mod_base = OTHER; note = 2'-fluoro nucleotide
  modified_base 10: mod_base = OTHER; note = 2'-O-Methyl nucleotide
  modified_base 11: mod_base = OTHER; note = 2'-fluoro nucleotide
  modified_base 12: mod_base = OTHER; note = 2'-O-Methyl nucleotide
  modified_base 13: mod_base = OTHER; note = 2'-fluoro nucleotide
  modified_base 14: mod_base = OTHER; note = 2'-O-Methyl nucleotide
  modified_base 15: mod_base = OTHER; note = 2'-fluoro nucleotide
  modified_base 16: mod_base = OTHER; note = 2'-O-Methyl nucleotide
  modified_base 17: mod_base = OTHER; note = 2'-fluoro nucleotide
  modified_base 18: mod_base = OTHER; note = 2'-O-Methyl nucleotide
  modified_base 19: mod_base = OTHER; note = 2'-fluoro nucleotide
  modified_base 20: mod_base = OTHER; note = deoxy-thymine phosphorothioate
  misc_feature 1..19: note = RNA
  misc_feature 20..21: note = DNA
gatgcaaataaaaccggactt

SEQ ID NO: 1471 - DNA, 21 bp, synthetic construct
  misc_feature 1..21: note = Description of Artificial Sequence: Synthetic oligonucleotide
  source 1..21: mol_type = other DNA
  modified_base 1: mod_base = OTHER; note = 2'-fluoro nucleotide
  modified_base 2: mod_base = OTHER; note = 2'-fluoro nucleotide
  modified_base 3: mod_base = OTHER; note = 2'-O-Methyl nucleotide
  modified_base 4: mod_base = OTHER; note = 2'-fluoro nucleotide
  modified_base 5: mod_base = OTHER; note = 2'-O-Methyl nucleotide
  modified_base 6: mod_base = OTHER; note = 2'-fluoro nucleotide
  modified_base 7: mod_base = OTHER; note = 2'-O-Methyl nucleotide
  modified_base 8: mod_base = OTHER; note = 2'-fluoro nucleotide
  modified_base 9: mod_base = OTHER; note = 2'-O-Methyl nucleotide
  modified_base 10: mod_base = OTHER; note = 2'-fluoro nucleotide
  modified_base 11: mod_base = OTHER; note = 2'-O-Methyl nucleotide
  modified_base 12: mod_base = OTHER; note = 2'-fluoro nucleotide
  modified_base 13: mod_base = OTHER; note = 2'-O-Methyl nucleotide
  modified_base 14: mod_base = OTHER; note = 2'-fluoro nucleotide
  modified_base 15: mod_base = OTHER; note = 2'-O-Methyl nucleotide
  modified_base 16: mod_base = OTHER; note = 2'-fluoro nucleotide
  modified_base 17: mod_base = OTHER; note = 2'-O-Methyl nucleotide
  modified_base 18: mod_base = OTHER; note = 2'-fluoro nucleotide
  modified_base 19: mod_base = OTHER; note = 2'-O-Methyl nucleotide
  modified_base 20: mod_base = OTHER; note = deoxy-thymine phosphorothioate
  misc_feature 1..19: note = RNA
  misc_feature 20..21: note = DNA
gtccggttttatttgcatctt

SEQ ID NO: 1472 - DNA, 21 bp, synthetic construct
  misc_feature 1..21: note = Description of Artificial Sequence: Synthetic oligonucleotide
  source 1..21: mol_type = other DNA
  modified_base 1: mod_base = OTHER; note = 2'-O-Methyl nucleotide
  modified_base 2: mod_base = OTHER; note = 2'-O-Methyl nucleotide
  modified_base 3: mod_base = OTHER; note = 2'-fluoro nucleotide
  modified_base 4: mod_base = OTHER; note = 2'-O-Methyl nucleotide
  modified_base 5: mod_base = OTHER; note = 2'-fluoro nucleotide
  modified_base 6: mod_base = OTHER; note = 2'-O-Methyl nucleotide
  modified_base 7: mod_base = OTHER; note = 2'-fluoro nucleotide
  modified_base 8: mod_base = OTHER; note = 2'-O-Methyl nucleotide
  modified_base 9: mod_base = OTHER; note = 2'-fluoro nucleotide
  modified_base 10: mod_base = OTHER; note = 2'-O-Methyl nucleotide
  modified_base 11: mod_base = OTHER; note = 2'-fluoro nucleotide
  modified_base 12: mod_base = OTHER; note = 2'-O-Methyl nucleotide
  modified_base 13: mod_base = OTHER; note = 2'-fluoro nucleotide
  modified_base 14: mod_base = OTHER; note = 2'-O-Methyl nucleotide
  modified_base 15: mod_base = OTHER; note = 2'-fluoro nucleotide
  modified_base 16: mod_base = OTHER; note = 2'-O-Methyl nucleotide
  modified_base 17: mod_base = OTHER; note = 2'-fluoro nucleotide
  modified_base 18: mod_base = OTHER; note = 2'-O-Methyl nucleotide
  modified_base 19: mod_base = OTHER; note = 2'-fluoro nucleotide
  modified_base 20: mod_base = OTHER; note = deoxy-thymine phosphorothioate
  misc_feature 1..19: note = RNA
  misc_feature 20..21: note = DNA
atgcaaataaaaccggacttt

SEQ ID NO: 1473 - DNA, 21 bp, synthetic construct
  misc_feature 1..21: note = Description of Artificial Sequence: Synthetic oligonucleotide
  source 1..21: mol_type = other DNA
  modified_base 1: mod_base = OTHER; note = 2'-fluoro nucleotide
  modified_base 2: mod_base = OTHER; note = 2'-fluoro nucleotide
  modified_base 3: mod_base = OTHER; note = 2'-O-Methyl nucleotide
  modified_base 4: mod_base = OTHER; note = 2'-fluoro nucleotide
  modified_base 5: mod_base = OTHER; note = 2'-O-Methyl nucleotide
  modified_base 6: mod_base = OTHER; note = 2'-fluoro nucleotide
  modified_base 7: mod_base = OTHER; note = 2'-O-Methyl nucleotide
  modified_base 8: mod_base = OTHER; note = 2'-fluoro nucleotide
  modified_base 9: mod_base = OTHER; note = 2'-O-Methyl nucleotide
  modified_base 10: mod_base = OTHER; note = 2'-fluoro nucleotide
  modified_base 11: mod_base = OTHER; note = 2'-O-Methyl nucleotide
  modified_base 12: mod_base = OTHER; note = 2'-fluoro nucleotide
  modified_base 13: mod_base = OTHER; note = 2'-O-Methyl nucleotide
  modified_base 14: mod_base = OTHER; note = 2'-fluoro nucleotide
  modified_base 15: mod_base = OTHER; note = 2'-O-Methyl nucleotide
  modified_base 16: mod_base = OTHER; note = 2'-fluoro nucleotide
  modified_base 17: mod_base = OTHER; note = 2'-O-Methyl nucleotide
  modified_base 18: mod_base = OTHER; note = 2'-fluoro nucleotide
  modified_base 19: mod_base = OTHER; note = 2'-O-Methyl nucleotide
  modified_base 20: mod_base = OTHER; note = deoxy-thymine phosphorothioate
  misc_feature 1..19: note = RNA
  misc_feature 20..21: note = DNA
agtccggttttatttgcattt

SEQ ID NO: 1474 - DNA, 21 bp, synthetic construct
  misc_feature 1..21: note = Description of Artificial Sequence: Synthetic oligonucleotide
  source 1..21: mol_type = other DNA
  modified_base 1: mod_base = OTHER; note = 2'-O-Methyl nucleotide
  modified_base 2: mod_base = OTHER; note = 2'-O-Methyl nucleotide
  modified_base 3: mod_base = OTHER; note = 2'-fluoro nucleotide
  modified_base 4: mod_base = OTHER; note = 2'-O-Methyl nucleotide
  modified_base 5: mod_base = OTHER; note = 2'-fluoro nucleotide
  modified_base 6: mod_base = OTHER; note = 2'-O-Methyl nucleotide
  modified_base 7: mod_base = OTHER; note = 2'-fluoro nucleotide
  modified_base 8: mod_base = OTHER; note = 2'-O-Methyl nucleotide
  modified_base 9: mod_base = OTHER; note = 2'-fluoro nucleotide
  modified_base 10: mod_base = OTHER; note = 2'-O-Methyl nucleotide
  modified_base 11: mod_base = OTHER; note = 2'-fluoro nucleotide
  modified_base 12: mod_base = OTHER; note = 2'-O-Methyl nucleotide
  modified_base 13: mod_base = OTHER; note = 2'-fluoro nucleotide
  modified_base 14: mod_base = OTHER; note = 2'-O-Methyl nucleotide
  modified_base 15: mod_base = OTHER; note = 2'-fluoro nucleotide
  modified_base 16: mod_base = OTHER; note = 2'-O-Methyl nucleotide
  modified_base 17: mod_base = OTHER; note = 2'-fluoro nucleotide
  modified_base 18: mod_base = OTHER; note = 2'-O-Methyl nucleotide
  modified_base 19: mod_base = OTHER; note = 2'-fluoro nucleotide
  modified_base 20: mod_base = OTHER; note = deoxy-thymine phosphorothioate
  misc_feature 1..19: note = RNA
  misc_feature 20..21: note = DNA
tgcaaataaaaccggactgtt

SEQ ID NO: 1475 - DNA, 21 bp, synthetic construct
  misc_feature 1..21: note = Description of Artificial Sequence: Synthetic oligonucleotide
  source 1..21: mol_type = other DNA
  modified_base 1: mod_base = OTHER; note = 2'-fluoro nucleotide
  modified_base 2: mod_base = OTHER; note = 2'-fluoro nucleotide
  modified_base 3: mod_base = OTHER; note = 2'-O-Methyl nucleotide
  modified_base 4: mod_base = OTHER; note = 2'-fluoro nucleotide
  modified_base 5: mod_base = OTHER; note = 2'-O-Methyl nucleotide
  modified_base 6: mod_base = OTHER; note = 2'-fluoro nucleotide
  modified_base 7: mod_base = OTHER; note = 2'-O-Methyl nucleotide
  modified_base 8: mod_base = OTHER; note = 2'-fluoro nucleotide
  modified_base 9: mod_base = OTHER; note = 2'-O-Methyl nucleotide
  modified_base 10: mod_base = OTHER; note = 2'-fluoro nucleotide
  modified_base 11: mod_base = OTHER; note = 2'-O-Methyl nucleotide
  modified_base 12: mod_base = OTHER; note = 2'-fluoro nucleotide
  modified_base 13: mod_base = OTHER; note = 2'-O-Methyl nucleotide
  modified_base 14: mod_base = OTHER; note = 2'-fluoro nucleotide
  modified_base 15: mod_base = OTHER; note = 2'-O-Methyl nucleotide
  modified_base 16: mod_base = OTHER; note = 2'-fluoro nucleotide
  modified_base 17: mod_base = OTHER; note = 2'-O-Methyl nucleotide
  modified_base 18: mod_base = OTHER; note = 2'-fluoro nucleotide
  modified_base 19: mod_base = OTHER; note = 2'-O-Methyl nucleotide
  modified_base 20: mod_base = OTHER; note = deoxy-thymine phosphorothioate
  misc_feature 1..19: note = RNA
  misc_feature 20..21: note = DNA
cagtccggttttatttgcatt

SEQ ID NO: 1476 - DNA, 21 bp, synthetic construct
  misc_feature 1..21: note = Description of Artificial Sequence: Synthetic oligonucleotide
  source 1..21: mol_type = other DNA
  modified_base 1: mod_base = OTHER; note = 2'-O-Methyl nucleotide
  modified_base 2: mod_base = OTHER; note = 2'-O-Methyl nucleotide
  modified_base 3: mod_base = OTHER; note = 2'-fluoro nucleotide
  modified_base 4: mod_base = OTHER; note = 2'-O-Methyl nucleotide
  modified_base 5: mod_base = OTHER; note = 2'-fluoro nucleotide
  modified_base 6: mod_base = OTHER; note = 2'-O-Methyl nucleotide
  modified_base 7: mod_base = OTHER; note = 2'-fluoro nucleotide
  modified_base 8: mod_base = OTHER; note = 2'-O-Methyl nucleotide
  modified_base 9: mod_base = OTHER; note = 2'-fluoro nucleotide
  modified_base 10: mod_base = OTHER; note = 2'-O-Methyl nucleotide
  modified_base 11: mod_base = OTHER; note = 2'-fluoro nucleotide
  modified_base 12: mod_base = OTHER; note = 2'-O-Methyl nucleotide
  modified_base 13: mod_base = OTHER; note = 2'-fluoro nucleotide
  modified_base 14: mod_base = OTHER; note = 2'-O-Methyl nucleotide
  modified_base 15: mod_base = OTHER; note = 2'-fluoro nucleotide
  modified_base 16: mod_base = OTHER; note = 2'-O-Methyl nucleotide
  modified_base 17: mod_base = OTHER; note = 2'-fluoro nucleotide
  modified_base 18: mod_base = OTHER; note = 2'-O-Methyl nucleotide
  modified_base 19: mod_base = OTHER; note = 2'-fluoro nucleotide
  modified_base 20: mod_base = OTHER; note = deoxy-thymine phosphorothioate
  misc_feature 1..19: note = RNA
  misc_feature 20..21: note = DNA
caaataaaaccggactgaatt

SEQ ID NO: 1477 - DNA, 21 bp, synthetic construct
  misc_feature 1..21: note = Description of Artificial Sequence: Synthetic oligonucleotide
  source 1..21: mol_type = other DNA
  modified_base 1: mod_base = OTHER; note = 2'-fluoro nucleotide
  modified_base 2: mod_base = OTHER; note = 2'-fluoro nucleotide
  modified_base 3: mod_base = OTHER; note = 2'-O-Methyl nucleotide
  modified_base 4: mod_base = OTHER; note = 2'-fluoro nucleotide
  modified_base 5: mod_base = OTHER; note = 2'-O-Methyl nucleotide
  modified_base 6: mod_base = OTHER; note = 2'-fluoro nucleotide
  modified_base 7: mod_base = OTHER; note = 2'-O-Methyl nucleotide
  modified_base 8: mod_base = OTHER; note = 2'-fluoro nucleotide
  modified_base 9: mod_base = OTHER; note = 2'-O-Methyl nucleotide
  modified_base 10: mod_base = OTHER; note = 2'-fluoro nucleotide
  modified_base 11: mod_base = OTHER; note = 2'-O-Methyl nucleotide
  modified_base 12: mod_base = OTHER; note = 2'-fluoro nucleotide
  modified_base 13: mod_base = OTHER; note = 2'-O-Methyl nucleotide
  modified_base 14: mod_base = OTHER; note = 2'-fluoro nucleotide
  modified_base 15: mod_base = OTHER; note = 2'-O-Methyl nucleotide
  modified_base 16: mod_base = OTHER; note = 2'-fluoro nucleotide
  modified_base 17: mod_base = OTHER; note = 2'-O-Methyl nucleotide
  modified_base 18: mod_base = OTHER; note = 2'-fluoro nucleotide
  modified_base 19: mod_base = OTHER; note = 2'-O-Methyl nucleotide
  modified_base 20: mod_base = OTHER; note = deoxy-thymine phosphorothioate
  misc_feature 1..19: note = RNA
  misc_feature 20..21: note = DNA
ttcagtccggttttatttgtt

SEQ ID NO: 1478 - DNA, 21 bp, synthetic construct
  misc_feature 1..21: note = Description of Artificial Sequence: Synthetic oligonucleotide
  source 1..21: mol_type = other DNA
  modified_base 1: mod_base = OTHER; note = 2'-O-Methyl nucleotide
  modified_base 2: mod_base = OTHER; note = 2'-O-Methyl nucleotide
  modified_base 3: mod_base = OTHER; note = 2'-fluoro nucleotide
  modified_base 4: mod_base = OTHER; note = 2'-O-Methyl nucleotide
  modified_base 5: mod_base = OTHER; note = 2'-fluoro nucleotide
  modified_base 6: mod_base = OTHER; note = 2'-O-Methyl nucleotide
  modified_base 7: mod_base = OTHER; note = 2'-fluoro nucleotide
  modified_base 8: mod_base = OTHER; note = 2'-O-Methyl nucleotide
  modified_base 9: mod_base = OTHER; note = 2'-fluoro nucleotide
  modified_base 10: mod_base = OTHER; note = 2'-O-Methyl nucleotide
  modified_base 11: mod_base = OTHER; note = 2'-fluoro nucleotide
  modified_base 12: mod_base = OTHER; note = 2'-O-Methyl nucleotide
  modified_base 13: mod_base = OTHER; note = 2'-fluoro nucleotide
  modified_base 14: mod_base = OTHER; note = 2'-O-Methyl nucleotide
  modified_base 15: mod_base = OTHER; note = 2'-fluoro nucleotide
  modified_base 16: mod_base = OTHER; note = 2'-O-Methyl nucleotide
  modified_base 17: mod_base = OTHER; note = 2'-fluoro nucleotide
  modified_base 18: mod_base = OTHER; note = 2'-O-Methyl nucleotide
  modified_base 19: mod_base = OTHER; note = 2'-fluoro nucleotide
  modified_base 20: mod_base = OTHER; note = deoxy-thymine phosphorothioate
  misc_feature 1..19: note = RNA
  misc_feature 20..21: note = DNA
aaataaaaccggactgaagtt

SEQ ID NO: 1479 - DNA, 21 bp, synthetic construct
  misc_feature 1..21: note = Description of Artificial Sequence: Synthetic oligonucleotide
  source 1..21: mol_type = other DNA
  modified_base 1: mod_base = OTHER; note = 2'-fluoro nucleotide
  modified_base 2: mod_base = OTHER; note = 2'-fluoro nucleotide
  modified_base 3: mod_base = OTHER; note = 2'-O-Methyl nucleotide
  modified_base 4: mod_base = OTHER; note = 2'-fluoro nucleotide
  modified_base 5: mod_base = OTHER; note = 2'-O-Methyl nucleotide
  modified_base 6: mod_base = OTHER; note = 2'-fluoro nucleotide
  modified_base 7: mod_base = OTHER; note = 2'-O-Methyl nucleotide
  modified_base 8: mod_base = OTHER; note = 2'-fluoro nucleotide
  modified_base 9: mod_base = OTHER; note = 2'-O-Methyl nucleotide
  modified_base 10: mod_base = OTHER; note = 2'-fluoro nucleotide
  modified_base 11: mod_base = OTHER; note = 2'-O-Methyl nucleotide
  modified_base 12: mod_base = OTHER; note = 2'-fluoro nucleotide
  modified_base 13: mod_base = OTHER; note = 2'-O-Methyl nucleotide
  modified_base 14: mod_base = OTHER; note = 2'-fluoro nucleotide
  modified_base 15: mod_base = OTHER; note = 2'-O-Methyl nucleotide
  modified_base 16: mod_base = OTHER; note = 2'-fluoro nucleotide
  modified_base 17: mod_base = OTHER; note = 2'-O-Methyl nucleotide
  modified_base 18: mod_base = OTHER; note = 2'-fluoro nucleotide
  modified_base 19: mod_base = OTHER; note = 2'-O-Methyl nucleotide
  modified_base 20: mod_base = OTHER; note = deoxy-thymine phosphorothioate
  misc_feature 1..19: note = RNA
  misc_feature 20..21: note = DNA
cttcagtccggttttattttt

SEQ ID NO: 1480 - DNA, 21 bp, synthetic construct
  misc_feature 1..21: note = Description of Artificial Sequence: Synthetic oligonucleotide
  source 1..21: mol_type = other DNA
  modified_base 1: mod_base = OTHER; note = 2'-O-Methyl nucleotide
  modified_base 2: mod_base = OTHER; note = 2'-O-Methyl nucleotide
  modified_base 3: mod_base = OTHER; note = 2'-fluoro nucleotide
  modified_base 4: mod_base = OTHER; note = 2'-O-Methyl nucleotide
  modified_base 5: mod_base = OTHER; note = 2'-fluoro nucleotide
  modified_base 6: mod_base = OTHER; note = 2'-O-Methyl nucleotide
  modified_base 7: mod_base = OTHER; note = 2'-fluoro nucleotide
  modified_base 8: mod_base = OTHER; note = 2'-O-Methyl nucleotide
  modified_base 9: mod_base = OTHER; note = 2'-fluoro nucleotide
  modified_base 10: mod_base = OTHER; note = 2'-O-Methyl nucleotide
  modified_base 11: mod_base = OTHER; note = 2'-fluoro nucleotide
  modified_base 12: mod_base = OTHER; note = 2'-O-Methyl nucleotide
  modified_base 13: mod_base = OTHER; note = 2'-fluoro nucleotide
  modified_base 14: mod_base = OTHER; note = 2'-O-Methyl nucleotide
  modified_base 15: mod_base = OTHER; note = 2'-fluoro nucleotide
  modified_base 16: mod_base = OTHER; note = 2'-O-Methyl nucleotide
  modified_base 17: mod_base = OTHER; note = 2'-fluoro nucleotide
  modified_base 18: mod_base = OTHER; note = 2'-O-Methyl nucleotide
  modified_base 19: mod_base = OTHER; note = 2'-fluoro nucleotide
  modified_base 20: mod_base = OTHER; note = deoxy-thymine phosphorothioate
  misc_feature 1..19: note = RNA
  misc_feature 20..21: note = DNA
aataaaaccggactgaaggtt

SEQ ID NO: 1481 - DNA, 21 bp, synthetic construct
  misc_feature 1..21: note = Description of Artificial Sequence: Synthetic oligonucleotide
  source 1..21: mol_type = other DNA
  modified_base 1: mod_base = OTHER; note = 2'-fluoro nucleotide
  modified_base 2: mod_base = OTHER; note = 2'-fluoro nucleotide
  modified_base 3: mod_base = OTHER; note = 2'-O-Methyl nucleotide
  modified_base 4: mod_base = OTHER; note = 2'-fluoro nucleotide
  modified_base 5: mod_base = OTHER; note = 2'-O-Methyl nucleotide
  modified_base 6: mod_base = OTHER; note = 2'-fluoro nucleotide
  modified_base 7: mod_base = OTHER; note = 2'-O-Methyl nucleotide
  modified_base 8: mod_base = OTHER; note = 2'-fluoro nucleotide
  modified_base 9: mod_base = OTHER; note = 2'-O-Methyl nucleotide
  modified_base 10: mod_base = OTHER; note = 2'-fluoro nucleotide
  modified_base 11: mod_base = OTHER; note = 2'-O-Methyl nucleotide
  modified_base 12: mod_base = OTHER; note = 2'-fluoro nucleotide
  modified_base 13: mod_base = OTHER; note = 2'-O-Methyl nucleotide
  modified_base 14: mod_base = OTHER; note = 2'-fluoro nucleotide
  modified_base 15: mod_base = OTHER; note = 2'-O-Methyl nucleotide
  modified_base 16: mod_base = OTHER; note = 2'-fluoro nucleotide
  modified_base 17: mod_base = OTHER; note = 2'-O-Methyl nucleotide
  modified_base 18: mod_base = OTHER; note = 2'-fluoro nucleotide
  modified_base 19: mod_base = OTHER; note = 2'-O-Methyl nucleotide
  modified_base 20: mod_base = OTHER; note = deoxy-thymine phosphorothioate
  misc_feature 1..19: note = RNA
  misc_feature 20..21: note = DNA
ccttcagtccggttttatttt

SEQ ID NO: 1482 - DNA, 21 bp, synthetic construct
  misc_feature 1..21: note = Description of Artificial Sequence: Synthetic oligonucleotide
  source 1..21: mol_type = other DNA
  modified_base 1: mod_base = OTHER; note = 2'-O-Methyl nucleotide
  modified_base 2: mod_base = OTHER; note = 2'-O-Methyl nucleotide
  modified_base 3: mod_base = OTHER; note = 2'-fluoro nucleotide
  modified_base 4: mod_base = OTHER; note = 2'-O-Methyl nucleotide
  modified_base 5: mod_base = OTHER; note = 2'-fluoro nucleotide
  modified_base 6: mod_base = OTHER; note = 2'-O-Methyl nucleotide
  modified_base 7: mod_base = OTHER; note = 2'-fluoro nucleotide
  modified_base 8: mod_base = OTHER; note = 2'-O-Methyl nucleotide
  modified_base 9: mod_base = OTHER; note = 2'-fluoro nucleotide
  modified_base 10: mod_base = OTHER; note = 2'-O-Methyl nucleotide
  modified_base 11: mod_base = OTHER; note = 2'-fluoro nucleotide
  modified_base 12: mod_base = OTHER; note = 2'-O-Methyl nucleotide
  modified_base 13: mod_base = OTHER; note = 2'-fluoro nucleotide
  modified_base 14: mod_base = OTHER; note = 2'-O-Methyl nucleotide
  modified_base 15: mod_base = OTHER; note = 2'-fluoro nucleotide
  modified_base 16: mod_base = OTHER; note = 2'-O-Methyl nucleotide
  modified_base 17: mod_base = OTHER; note = 2'-fluoro nucleotide
  modified_base 18: mod_base = OTHER; note = 2'-O-Methyl nucleotide
  modified_base 19: mod_base = OTHER; note = 2'-fluoro nucleotide
  modified_base 20: mod_base = OTHER; note = deoxy-thymine phosphorothioate
  misc_feature 1..19: note = RNA
  misc_feature 20..21: note = DNA
taaaaccggactgaaggagtt

SEQ ID NO: 1483 - DNA, 21 bp, synthetic construct
  misc_feature 1..21: note = Description of Artificial Sequence: Synthetic oligonucleotide
  source 1..21: mol_type = other DNA
  modified_base 1: mod_base = OTHER; note = 2'-fluoro nucleotide
  modified_base 2: mod_base = OTHER; note = 2'-fluoro nucleotide
  modified_base 3: mod_base = OTHER; note = 2'-O-Methyl nucleotide
  modified_base 4: mod_base = OTHER; note = 2'-fluoro nucleotide
  modified_base 5: mod_base = OTHER; note = 2'-O-Methyl nucleotide
  modified_base 6: mod_base = OTHER; note = 2'-fluoro nucleotide
  modified_base 7: mod_base = OTHER; note = 2'-O-Methyl nucleotide
  modified_base 8: mod_base = OTHER; note = 2'-fluoro nucleotide
  modified_base 9: mod_base = OTHER; note = 2'-O-Methyl nucleotide
  modified_base 10: mod_base = OTHER; note = 2'-fluoro nucleotide
  modified_base 11: mod_base = OTHER; note = 2'-O-Methyl nucleotide
  modified_base 12: mod_base = OTHER; note = 2'-fluoro nucleotide
  modified_base 13: mod_base = OTHER; note = 2'-O-Methyl nucleotide
  modified_base 14: mod_base = OTHER; note = 2'-fluoro nucleotide
  modified_base 15: mod_base = OTHER; note = 2'-O-Methyl nucleotide
  modified_base 16: mod_base = OTHER; note = 2'-fluoro nucleotide
  modified_base 17: mod_base = OTHER; note = 2'-O-Methyl nucleotide
  modified_base 18: mod_base = OTHER; note = 2'-fluoro nucleotide
  modified_base 19: mod_base = OTHER; note = 2'-O-Methyl nucleotide
  modified_base 20: mod_base = OTHER; note = deoxy-thymine phosphorothioate
  misc_feature 1..19: note = RNA
  misc_feature 20..21: note = DNA
ctccttcagtccggttttatt

SEQ ID NO: 1484 - DNA, 21 bp, synthetic construct
  misc_feature 1..21: note = Description of Artificial Sequence: Synthetic oligonucleotide
  source 1..21: mol_type = other DNA
  modified_base 1: mod_base = OTHER; note = 2'-O-Methyl nucleotide
  modified_base 2: mod_base = OTHER; note = 2'-O-Methyl nucleotide
  modified_base 3: mod_base = OTHER; note = 2'-fluoro nucleotide
  modified_base 4: mod_base = OTHER; note = 2'-O-Methyl nucleotide
  modified_base 5: mod_base = OTHER; note = 2'-fluoro nucleotide
  modified_base 6: mod_base = OTHER; note = 2'-O-Methyl nucleotide
  modified_base 7: mod_base = OTHER; note = 2'-fluoro nucleotide
  modified_base 8: mod_base = OTHER; note = 2'-O-Methyl nucleotide
  modified_base 9: mod_base = OTHER; note = 2'-fluoro nucleotide
  modified_base 10: mod_base = OTHER; note = 2'-O-Methyl nucleotide
  modified_base 11: mod_base = OTHER; note = 2'-fluoro nucleotide
  modified_base 12: mod_base = OTHER; note = 2'-O-Methyl nucleotide
  modified_base 13: mod_base = OTHER; note = 2'-fluoro nucleotide
  modified_base 14: mod_base = OTHER; note = 2'-O-Methyl nucleotide
  modified_base 15: mod_base = OTHER; note = 2'-fluoro nucleotide
  modified_base 16: mod_base = OTHER; note = 2'-O-Methyl nucleotide
  modified_base 17: mod_base = OTHER; note = 2'-fluoro nucleotide
  modified_base 18: mod_base = OTHER; note = 2'-O-Methyl nucleotide
  modified_base 19: mod_base = OTHER; note = 2'-fluoro nucleotide
  modified_base 20: mod_base = OTHER; note = deoxy-thymine phosphorothioate
  misc_feature 1..19: note = RNA
  misc_feature 20..21: note = DNA
aaaaccggactgaaggagctt

SEQ ID NO: 1485 - DNA, 21 bp, synthetic construct
  misc_feature 1..21: note = Description of Artificial Sequence: Synthetic oligonucleotide
  source 1..21: mol_type = other DNA
  modified_base 1: mod_base = OTHER; note = 2'-fluoro nucleotide
  modified_base 2: mod_base = OTHER; note = 2'-fluoro nucleotide
  modified_base 3: mod_base = OTHER; note = 2'-O-Methyl nucleotide
  modified_base 4: mod_base = OTHER; note = 2'-fluoro nucleotide
  modified_base 5: mod_base = OTHER; note = 2'-O-Methyl nucleotide
  modified_base 6: mod_base = OTHER; note = 2'-fluoro nucleotide
  modified_base 7: mod_base = OTHER; note = 2'-O-Methyl nucleotide
  modified_base 8: mod_base = OTHER; note = 2'-fluoro nucleotide
  modified_base 9: mod_base = OTHER; note = 2'-O-Methyl nucleotide
  modified_base 10: mod_base = OTHER; note = 2'-fluoro nucleotide
  modified_base 11: mod_base = OTHER; note = 2'-O-Methyl nucleotide
  modified_base 12: mod_base = OTHER; note = 2'-fluoro nucleotide
  modified_base 13: mod_base = OTHER; note = 2'-O-Methyl nucleotide
  modified_base 14: mod_base = OTHER; note = 2'-fluoro nucleotide
  modified_base 15: mod_base = OTHER; note = 2'-O-Methyl nucleotide
  modified_base 16: mod_base = OTHER; note = 2'-fluoro nucleotide
  modified_base 17: mod_base = OTHER; note = 2'-O-Methyl nucleotide
  modified_base 18: mod_base = OTHER; note = 2'-fluoro nucleotide
  modified_base 19: mod_base = OTHER; note = 2'-O-Methyl nucleotide
  modified_base 20: mod_base = OTHER; note = deoxy-thymine phosphorothioate
  misc_feature 1..19: note = RNA
  misc_feature 20..21: note = DNA
gctccttcagtccggtttttt

SEQ ID NO: 1486 - DNA, 21 bp, synthetic construct
  misc_feature 1..21: note = Description of Artificial Sequence: Synthetic oligonucleotide
  source 1..21: mol_type = other DNA
  modified_base 1: mod_base = OTHER; note = 2'-O-Methyl nucleotide
  modified_base 2: mod_base = OTHER; note = 2'-O-Methyl nucleotide
  modified_base 3: mod_base = OTHER; note = 2'-fluoro nucleotide
  modified_base 4: mod_base = OTHER; note = 2'-O-Methyl nucleotide
  modified_base 5: mod_base = OTHER; note = 2'-fluoro nucleotide
  modified_base 6: mod_base = OTHER; note = 2'-O-Methyl nucleotide
  modified_base 7: mod_base = OTHER; note = 2'-fluoro nucleotide
  modified_base 8: mod_base = OTHER; note = 2'-O-Methyl nucleotide
  modified_base 9: mod_base = OTHER; note = 2'-fluoro nucleotide
  modified_base 10: mod_base = OTHER; note = 2'-O-Methyl nucleotide
  modified_base 11: mod_base = OTHER; note = 2'-fluoro nucleotide
  modified_base 12: mod_base = OTHER; note = 2'-O-Methyl nucleotide
  modified_base 13: mod_base = OTHER; note = 2'-fluoro nucleotide
  modified_base 14: mod_base = OTHER; note = 2'-O-Methyl nucleotide
  modified_base 15: mod_base = OTHER; note = 2'-fluoro nucleotide
  modified_base 16: mod_base = OTHER; note = 2'-O-Methyl nucleotide
  modified_base 17: mod_base = OTHER; note = 2'-fluoro nucleotide
  modified_base 18: mod_base = OTHER; note = 2'-O-Methyl nucleotide
  modified_base 19: mod_base = OTHER; note = 2'-fluoro nucleotide
  modified_base 20: mod_base = OTHER; note = deoxy-thymine phosphorothioate
  misc_feature 1..19: note = RNA
  misc_feature 20..21: note = DNA
aaaccggactgaaggagcttt

SEQ ID NO: 1487 - DNA, 21 bp, synthetic construct
  misc_feature 1..21: note = Description of Artificial Sequence: Synthetic oligonucleotide
  source 1..21: mol_type = other DNA
  modified_base 1: mod_base = OTHER; note = 2'-fluoro nucleotide
  modified_base 2: mod_base = OTHER; note = 2'-fluoro nucleotide
  modified_base 3: mod_base = OTHER; note = 2'-O-Methyl nucleotide
  modified_base 4: mod_base = OTHER; note = 2'-fluoro nucleotide
  modified_base 5: mod_base = OTHER; note = 2'-O-Methyl nucleotide
  modified_base 6: mod_base = OTHER; note = 2'-fluoro nucleotide
  modified_base 7: mod_base = OTHER; note = 2'-O-Methyl nucleotide
  modified_base 8: mod_base = OTHER; note = 2'-fluoro nucleotide
  modified_base 9: mod_base = OTHER; note = 2'-O-Methyl nucleotide
  modified_base 10: mod_base = OTHER; note = 2'-fluoro nucleotide
  modified_base 11: mod_base = OTHER; note = 2'-O-Methyl nucleotide
  modified_base 12: mod_base = OTHER; note = 2'-fluoro nucleotide
  modified_base 13: mod_base = OTHER; note = 2'-O-Methyl nucleotide
  modified_base 14: mod_base = OTHER; note = 2'-fluoro nucleotide
  modified_base 15: mod_base = OTHER; note = 2'-O-Methyl nucleotide
  modified_base 16: mod_base = OTHER; note = 2'-fluoro nucleotide
  modified_base 17: mod_base = OTHER; note = 2'-O-Methyl nucleotide
  modified_base 18: mod_base = OTHER; note = 2'-fluoro nucleotide
  modified_base 19: mod_base = OTHER; note = 2'-O-Methyl nucleotide
  modified_base 20: mod_base = OTHER; note = deoxy-thymine phosphorothioate
  misc_feature 1..19: note = RNA
  misc_feature 20..21: note = DNA
agctccttcagtccggttttt

SEQ ID NO: 1488 - DNA, 21 bp, synthetic construct
  misc_feature 1..21: note = Description of Artificial Sequence: Synthetic oligonucleotide
  source 1..21: mol_type = other DNA
  modified_base 1: mod_base = OTHER; note = 2'-O-Methyl nucleotide
  modified_base 2: mod_base = OTHER; note = 2'-O-Methyl nucleotide
  modified_base 3: mod_base = OTHER; note = 2'-fluoro nucleotide
  modified_base 4: mod_base = OTHER; note = 2'-O-Methyl nucleotide
  modified_base 5: mod_base = OTHER; note = 2'-fluoro nucleotide
  modified_base 6: mod_base = OTHER; note = 2'-O-Methyl nucleotide
  modified_base 7: mod_base = OTHER; note = 2'-fluoro nucleotide
  modified_base 8: mod_base = OTHER; note = 2'-O-Methyl nucleotide
  modified_base 9: mod_base = OTHER; note = 2'-fluoro nucleotide
  modified_base 10: mod_base = OTHER; note = 2'-O-Methyl nucleotide
  modified_base 11: mod_base = OTHER; note = 2'-fluoro nucleotide
  modified_base 12: mod_base = OTHER; note = 2'-O-Methyl nucleotide
  modified_base 13: mod_base = OTHER; note = 2'-fluoro nucleotide
  modified_base 14: mod_base = OTHER; note = 2'-O-Methyl nucleotide
  modified_base 15: mod_base = OTHER; note = 2'-fluoro nucleotide
  modified_base 16: mod_base = OTHER; note = 2'-O-Methyl nucleotide
  modified_base 17: mod_base = OTHER; note = 2'-fluoro nucleotide
  modified_base 18: mod_base = OTHER; note = 2'-O-Methyl nucleotide
  modified_base 19: mod_base = OTHER; note = 2'-fluoro nucleotide
  modified_base 20: mod_base = OTHER; note = deoxy-thymine phosphorothioate
  misc_feature 1..19: note = RNA
  misc_feature 20..21: note = DNA
aaccggactgaaggagctgtt

SEQ ID NO: 1489 - DNA, 21 bp, synthetic construct
  misc_feature 1..21: note = Description of Artificial Sequence: Synthetic oligonucleotide
  source 1..21: mol_type = other DNA
  modified_base 1: mod_base = OTHER; note = 2'-fluoro nucleotide
  modified_base 2: mod_base = OTHER; note = 2'-fluoro nucleotide
  modified_base 3: mod_base = OTHER; note = 2'-O-Methyl nucleotide
  modified_base 4: mod_base = OTHER; note = 2'-fluoro nucleotide
  modified_base 5: mod_base = OTHER; note = 2'-O-Methyl nucleotide
  modified_base 6: mod_base = OTHER; note = 2'-fluoro nucleotide
  modified_base 7: mod_base = OTHER; note = 2'-O-Methyl nucleotide
  modified_base 8: mod_base = OTHER; note = 2'-fluoro nucleotide
  modified_base 9: mod_base = OTHER; note = 2'-O-Methyl nucleotide
  modified_base 10: mod_base = OTHER; note = 2'-fluoro nucleotide
  modified_base 11: mod_base = OTHER; note = 2'-O-Methyl nucleotide
  modified_base 12: mod_base = OTHER; note = 2'-fluoro nucleotide
  modified_base 13: mod_base = OTHER; note = 2'-O-Methyl nucleotide
  modified_base 14: mod_base = OTHER; note = 2'-fluoro nucleotide
  modified_base 15: mod_base = OTHER; note = 2'-O-Methyl nucleotide
  modified_base 16: mod_base = OTHER; note = 2'-fluoro nucleotide
  modified_base 17: mod_base = OTHER; note = 2'-O-Methyl nucleotide
  modified_base 18: mod_base = OTHER; note = 2'-fluoro nucleotide
  modified_base 19: mod_base = OTHER; note = 2'-O-Methyl nucleotide
  modified_base 20: mod_base = OTHER; note = deoxy-thymine phosphorothioate
  misc_feature 1..19: note = RNA
  misc_feature 20..21: note = DNA
cagctccttcagtccggtttt

SEQ ID NO: 1490 - DNA, 21 bp, synthetic construct
  misc_feature 1..21: note = Description of Artificial Sequence: Synthetic oligonucleotide
  source 1..21: mol_type = other DNA
  modified_base 1: mod_base = OTHER; note = 2'-O-Methyl nucleotide
  modified_base 2: mod_base = OTHER; note = 2'-O-Methyl nucleotide
  modified_base 3: mod_base = OTHER; note = 2'-fluoro nucleotide
  modified_base 4: mod_base = OTHER; note = 2'-O-Methyl nucleotide
  modified_base 5: mod_base = OTHER; note = 2'-fluoro nucleotide
  modified_base 6: mod_base = OTHER; note = 2'-O-Methyl nucleotide
  modified_base 7: mod_base = OTHER; note = 2'-fluoro nucleotide
  modified_base 8: mod_base = OTHER; note = 2'-O-Methyl nucleotide
  modified_base 9: mod_base = OTHER; note = 2'-fluoro nucleotide
  modified_base 10: mod_base = OTHER; note = 2'-O-Methyl nucleotide
  modified_base 11: mod_base = OTHER; note = 2'-fluoro nucleotide
  modified_base 12: mod_base = OTHER; note = 2'-O-Methyl nucleotide
  modified_base 13: mod_base = OTHER; note = 2'-fluoro nucleotide
  modified_base 14: mod_base = OTHER; note = 2'-O-Methyl nucleotide
  modified_base 15: mod_base = OTHER; note = 2'-fluoro nucleotide
  modified_base 16: mod_base = OTHER; note = 2'-O-Methyl nucleotide
  modified_base 17: mod_base = OTHER; note = 2'-fluoro nucleotide
  modified_base 18: mod_base = OTHER; note = 2'-O-Methyl nucleotide
  modified_base 19: mod_base = OTHER; note = 2'-fluoro nucleotide
  modified_base 20: mod_base = OTHER; note = deoxy-thymine phosphorothioate
  misc_feature 1..19: note = RNA
  misc_feature 20..21: note = DNA
aggagctgcccatgagaaatt

SEQ ID NO: 1491 - DNA, 21 bp, synthetic construct
  misc_feature 1..21: note = Description of Artificial Sequence: Synthetic oligonucleotide
  source 1..21: mol_type = other DNA
  modified_base 1: mod_base = OTHER; note = 2'-fluoro nucleotide
  modified_base 2: mod_base = OTHER; note = 2'-fluoro nucleotide
  modified_base 3: mod_base = OTHER; note = 2'-O-Methyl nucleotide
  modified_base 4: mod_base = OTHER; note = 2'-fluoro nucleotide
  modified_base 5: mod_base = OTHER; note = 2'-O-Methyl nucleotide
  modified_base 6: mod_base = OTHER; note = 2'-fluoro nucleotide
  modified_base 7: mod_base = OTHER; note = 2'-O-Methyl nucleotide
  modified_base 8: mod_base = OTHER; note = 2'-fluoro nucleotide
  modified_base 9: mod_base = OTHER; note = 2'-O-Methyl nucleotide
  modified_base 10: mod_base = OTHER; note = 2'-fluoro nucleotide
  modified_base 11: mod_base = OTHER; note = 2'-O-Methyl nucleotide
  modified_base 12: mod_base = OTHER; note = 2'-fluoro nucleotide
  modified_base 13: mod_base = OTHER; note = 2'-O-Methyl nucleotide
  modified_base 14: mod_base = OTHER; note = 2'-fluoro nucleotide
  modified_base 15: mod_base = OTHER; note = 2'-O-Methyl nucleotide
  modified_base 16: mod_base = OTHER; note = 2'-fluoro nucleotide
  modified_base 17: mod_base = OTHER; note = 2'-O-Methyl nucleotide
  modified_base 18: mod_base = OTHER; note = 2'-fluoro nucleotide
  modified_base 19: mod_base = OTHER; note = 2'-O-Methyl nucleotide
  modified_base 20: mod_base = OTHER; note = deoxy-thymine phosphorothioate
  misc_feature 1..19: note = RNA
  misc_feature 20..21: note = DNA
tttctcatgggcagctccttt

SEQ ID NO: 1492 - DNA, 21 bp, synthetic construct
  misc_feature 1..21: note = Description of Artificial Sequence: Synthetic oligonucleotide
  source 1..21: mol_type = other DNA
  modified_base 1: mod_base = OTHER; note = 2'-O-Methyl nucleotide
  modified_base 2: mod_base = OTHER; note = 2'-O-Methyl nucleotide
  modified_base 3: mod_base = OTHER; note = 2'-fluoro nucleotide
  modified_base 4: mod_base = OTHER; note = 2'-O-Methyl nucleotide
  modified_base 5: mod_base = OTHER; note = 2'-fluoro nucleotide
  modified_base 6: mod_base = OTHER; note = 2'-O-Methyl nucleotide
  modified_base 7: mod_base = OTHER; note = 2'-fluoro nucleotide
  modified_base 8: mod_base = OTHER; note = 2'-O-Methyl nucleotide
  modified_base 9: mod_base = OTHER; note = 2'-fluoro nucleotide
  modified_base 10: mod_base = OTHER; note = 2'-O-Methyl nucleotide
  modified_base 11: mod_base = OTHER; note = 2'-fluoro nucleotide
  modified_base 12: mod_base = OTHER; note = 2'-O-Methyl nucleotide
  modified_base 13: mod_base = OTHER; note = 2'-fluoro nucleotide
  modified_base 14: mod_base = OTHER; note = 2'-O-Methyl nucleotide
  modified_base 15: mod_base = OTHER; note = 2'-fluoro nucleotide
  modified_base 16: mod_base = OTHER; note = 2'-O-Methyl nucleotide
  modified_base 17: mod_base = OTHER; note = 2'-fluoro nucleotide
  modified_base 18: mod_base = OTHER; note = 2'-O-Methyl nucleotide
  modified_base 19: mod_base = OTHER; note = 2'-fluoro nucleotide
  modified_base 20: mod_base = OTHER; note = deoxy-thymine phosphorothioate
  misc_feature 1..19: note = RNA
  misc_feature 20..21: note = DNA
tacaggaaatcctgcatggtt

SEQ ID NO: 1493 - DNA, 21 bp, synthetic construct
  misc_feature 1..21: note = Description of Artificial Sequence: Synthetic oligonucleotide
  source 1..21: mol_type = other DNA
  modified_base 1: mod_base = OTHER; note = 2'-fluoro nucleotide
  modified_base 2: mod_base = OTHER; note = 2'-fluoro nucleotide
  modified_base 3: mod_base = OTHER; note = 2'-O-Methyl nucleotide
  modified_base 4: mod_base = OTHER; note = 2'-fluoro nucleotide
  modified_base 5: mod_base = OTHER; note = 2'-O-Methyl nucleotide
  modified_base 6: mod_base = OTHER; note = 2'-fluoro nucleotide
  modified_base 7: mod_base = OTHER; note = 2'-O-Methyl nucleotide
  modified_base 8: mod_base = OTHER; note = 2'-fluoro nucleotide
  modified_base 9: mod_base = OTHER; note = 2'-O-Methyl nucleotide
  modified_base 10: mod_base = OTHER; note = 2'-fluoro nucleotide
  modified_base 11: mod_base = OTHER; note = 2'-O-Methyl nucleotide
  modified_base 12: mod_base = OTHER; note = 2'-fluoro nucleotide
  modified_base 13: mod_base = OTHER; note = 2'-O-Methyl nucleotide
  modified_base 14: mod_base = OTHER; note = 2'-fluoro nucleotide
  modified_base 15: mod_base = OTHER; note = 2'-O-Methyl nucleotide
  modified_base 16: mod_base = OTHER; note = 2'-fluoro nucleotide
  modified_base 17: mod_base = OTHER; note = 2'-O-Methyl nucleotide
  modified_base 18: mod_base = OTHER; note = 2'-fluoro nucleotide
  modified_base 19: mod_base = OTHER; note = 2'-O-Methyl nucleotide
  modified_base 20: mod_base = OTHER; note = deoxy-thymine phosphorothioate
  misc_feature 1..19: note = RNA
  misc_feature 20..21: note = DNA
ccatgcaggatttcctgtatt

SEQ ID NO: 1494 - DNA, 21 bp, synthetic construct
  misc_feature 1..21: note = Description of Artificial Sequence: Synthetic oligonucleotide
  source 1..21: mol_type = other DNA
  modified_base 1: mod_base = OTHER; note = 2'-O-Methyl nucleotide
  modified_base 2: mod_base = OTHER; note = 2'-O-Methyl nucleotide
  modified_base 3: mod_base = OTHER; note = 2'-fluoro nucleotide
  modified_base 4: mod_base = OTHER; note = 2'-O-Methyl nucleotide
  modified_base 5: mod_base = OTHER; note = 2'-fluoro nucleotide
  modified_base 6: mod_base = OTHER; note = 2'-O-Methyl nucleotide
  modified_base 7: mod_base = OTHER; note = 2'-fluoro nucleotide
  modified_base 8: mod_base = OTHER; note = 2'-O-Methyl nucleotide
  modified_base 9: mod_base = OTHER; note = 2'-fluoro nucleotide
  modified_base 10: mod_base = OTHER; note = 2'-O-Methyl nucleotide
  modified_base 11: mod_base = OTHER; note = 2'-fluoro nucleotide
  modified_base 12: mod_base = OTHER; note = 2'-O-Methyl nucleotide
  modified_base 13: mod_base = OTHER; note = 2'-fluoro nucleotide
  modified_base 14: mod_base = OTHER; note = 2'-O-Methyl nucleotide
  modified_base 15: mod_base = OTHER; note = 2'-fluoro nucleotide
  modified_base 16: mod_base = OTHER; note = 2'-O-Methyl nucleotide
  modified_base 17: mod_base = OTHER; note = 2'-fluoro nucleotide
  modified_base 18: mod_base = OTHER; note = 2'-O-Methyl nucleotide
  modified_base 19: mod_base = OTHER; note = 2'-fluoro nucleotide
  modified_base 20: mod_base = OTHER; note = deoxy-thymine phosphorothioate
  misc_feature 1..19: note = RNA
  misc_feature 20..21: note = DNA
aggaaatcctgcatggcgctt

SEQ ID NO: 1495 - DNA, 21 bp, synthetic construct
  misc_feature 1..21: note = Description of Artificial Sequence: Synthetic oligonucleotide
  source 1..21: mol_type = other DNA
  modified_base 1: mod_base = OTHER; note = 2'-fluoro nucleotide
  modified_base 2: mod_base = OTHER; note = 2'-fluoro nucleotide
  modified_base 3: mod_base = OTHER; note = 2'-O-Methyl nucleotide
  modified_base 4: mod_base = OTHER; note = 2'-fluoro nucleotide
  modified_base 5: mod_base = OTHER; note = 2'-O-Methyl nucleotide
  modified_base 6: mod_base = OTHER; note = 2'-fluoro nucleotide
  modified_base 7: mod_base = OTHER; note = 2'-O-Methyl nucleotide
  modified_base 8: mod_base = OTHER; note = 2'-fluoro nucleotide
  modified_base 9: mod_base = OTHER; note = 2'-O-Methyl nucleotide
  modified_base 10: mod_base = OTHER; note = 2'-fluoro nucleotide
  modified_base 11: mod_base = OTHER; note = 2'-O-Methyl nucleotide
  modified_base 12: mod_base = OTHER; note = 2'-fluoro nucleotide
  modified_base 13: mod_base = OTHER; note = 2'-O-Methyl nucleotide
  modified_base 14: mod_base = OTHER; note = 2'-fluoro nucleotide
  modified_base 15: mod_base = OTHER; note = 2'-O-Methyl nucleotide
  modified_base 16: mod_base = OTHER; note = 2'-fluoro nucleotide
  modified_base 17: mod_base = OTHER; note = 2'-O-Methyl nucleotide
  modified_base 18: mod_base = OTHER; note = 2'-fluoro nucleotide
  modified_base 19: mod_base = OTHER; note = 2'-O-Methyl nucleotide
  modified_base 20: mod_base = OTHER; note = deoxy-thymine phosphorothioate
  misc_feature 1..19: note = RNA
  misc_feature 20..21: note = DNA
gcgccatgcaggatttccttt

SEQ ID NO: 1496 - DNA, 21 bp, synthetic construct
  misc_feature 1..21: note = Description of Artificial Sequence: Synthetic oligonucleotide
  source 1..21: mol_type = other DNA
  modified_base 1: mod_base = OTHER; note = 2'-O-Methyl nucleotide
  modified_base 2: mod_base = OTHER; note = 2'-O-Methyl nucleotide
  modified_base 3: mod_base = OTHER; note = 2'-fluoro nucleotide
  modified_base 4: mod_base = OTHER; note = 2'-O-Methyl nucleotide
  modified_base 5: mod_base = OTHER; note = 2'-fluoro nucleotide
  modified_base 6: mod_base = OTHER; note = 2'-O-Methyl nucleotide
  modified_base 7: mod_base = OTHER; note = 2'-fluoro nucleotide
  modified_base 8: mod_base = OTHER; note = 2'-O-Methyl nucleotide
  modified_base 9: mod_base = OTHER; note = 2'-fluoro nucleotide
  modified_base 10: mod_base = OTHER; note = 2'-O-Methyl nucleotide
  modified_base 11: mod_base = OTHER; note = 2'-fluoro nucleotide
  modified_base 12: mod_base = OTHER; note = 2'-O-Methyl nucleotide
  modified_base 13: mod_base = OTHER; note = 2'-fluoro nucleotide
  modified_base 14: mod_base = OTHER; note = 2'-O-Methyl nucleotide
  modified_base 15: mod_base = OTHER; note = 2'-fluoro nucleotide
  modified_base 16: mod_base = OTHER; note = 2'-O-Methyl nucleotide
  modified_base 17: mod_base = OTHER; note = 2'-fluoro nucleotide
  modified_base 18: mod_base = OTHER; note = 2'-O-Methyl nucleotide
  modified_base 19: mod_base = OTHER; note = 2'-fluoro nucleotide
  modified_base 20: mod_base = OTHER; note = deoxy-thymine phosphorothioate
  misc_feature 1..19: note = RNA
  misc_feature 20..21: note = DNA
ggaaatcctgcatggcgcctt

SEQ ID NO: 1497 - DNA, 21 bp, synthetic construct
  misc_feature 1..21: note = Description of Artificial Sequence: Synthetic oligonucleotide
  source 1..21: mol_type = other DNA
  modified_base 1: mod_base = OTHER; note = 2'-fluoro nucleotide
  modified_base 2: mod_base = OTHER; note = 2'-fluoro nucleotide
  modified_base 3: mod_base = OTHER; note = 2'-O-Methyl nucleotide
  modified_base 4: mod_base = OTHER; note = 2'-fluoro nucleotide
  modified_base 5: mod_base = OTHER; note = 2'-O-Methyl nucleotide
  modified_base 6: mod_base = OTHER; note = 2'-fluoro nucleotide
  modified_base 7: mod_base = OTHER; note = 2'-O-Methyl nucleotide
  modified_base 8: mod_base = OTHER; note = 2'-fluoro nucleotide
  modified_base 9: mod_base = OTHER; note = 2'-O-Methyl nucleotide
  modified_base 10: mod_base = OTHER; note = 2'-fluoro nucleotide
  modified_base 11: mod_base = OTHER; note = 2'-O-Methyl nucleotide
  modified_base 12: mod_base = OTHER; note = 2'-fluoro nucleotide
  modified_base 13: mod_base = OTHER; note = 2'-O-Methyl nucleotide
  modified_base 14: mod_base = OTHER; note = 2'-fluoro nucleotide
  modified_base 15: mod_base = OTHER; note = 2'-O-Methyl nucleotide
  modified_base 16: mod_base = OTHER; note = 2'-fluoro nucleotide
  modified_base 17: mod_base = OTHER; note = 2'-O-Methyl nucleotide
  modified_base 18: mod_base = OTHER; note = 2'-fluoro nucleotide
  modified_base 19: mod_base = OTHER; note = 2'-O-Methyl nucleotide
  modified_base 20: mod_base = OTHER; note = deoxy-thymine phosphorothioate
  misc_feature 1..19: note = RNA
  misc_feature 20..21: note = DNA
ggcgccatgcaggatttcctt

SEQ ID NO: 1498 - DNA, 21 bp, synthetic construct
  misc_feature 1..21: note = Description of Artificial Sequence: Synthetic oligonucleotide
  source 1..21: mol_type = other DNA
  modified_base 1: mod_base = OTHER; note = 2'-O-Methyl nucleotide
  modified_base 2: mod_base = OTHER; note = 2'-O-Methyl nucleotide
  modified_base 3: mod_base = OTHER; note = 2'-fluoro nucleotide
  modified_base 4: mod_base = OTHER; note = 2'-O-Methyl nucleotide
  modified_base 5: mod_base = OTHER; note = 2'-fluoro nucleotide
  modified_base 6: mod_base = OTHER; note = 2'-O-Methyl nucleotide
  modified_base 7: mod_base = OTHER; note = 2'-fluoro nucleotide
  modified_base 8: mod_base = OTHER; note = 2'-O-Methyl nucleotide
  modified_base 9: mod_base = OTHER; note = 2'-fluoro nucleotide
  modified_base 10: mod_base = OTHER; note = 2'-O-Methyl nucleotide
  modified_base 11: mod_base = OTHER; note = 2'-fluoro nucleotide
  modified_base 12: mod_base = OTHER; note = 2'-O-Methyl nucleotide
  modified_base 13: mod_base = OTHER; note = 2'-fluoro nucleotide
  modified_base 14: mod_base = OTHER; note = 2'-O-Methyl nucleotide
  modified_base 15: mod_base = OTHER; note = 2'-fluoro nucleotide
  modified_base 16: mod_base = OTHER; note = 2'-O-Methyl nucleotide
  modified_base 17: mod_base = OTHER; note = 2'-fluoro nucleotide
  modified_base 18: mod_base = OTHER; note = 2'-O-Methyl nucleotide
  modified_base 19: mod_base = OTHER; note = 2'-fluoro nucleotide
  modified_base 20: mod_base = OTHER; note = deoxy-thymine phosphorothioate
  misc_feature 1..19: note = RNA
  misc_feature 20..21: note = DNA
gaaatcctgcatggcgccgtt

SEQ ID NO: 1499 - DNA, 21 bp, synthetic construct
  misc_feature 1..21: note = Description of Artificial Sequence: Synthetic oligonucleotide
  source 1..21: mol_type = other DNA
  modified_base 1: mod_base = OTHER; note = 2'-fluoro nucleotide
  modified_base 2: mod_base = OTHER; note = 2'-fluoro nucleotide
  modified_base 3: mod_base = OTHER; note = 2'-O-Methyl nucleotide
  modified_base 4: mod_base = OTHER; note = 2'-fluoro nucleotide
  modified_base 5: mod_base = OTHER; note = 2'-O-Methyl nucleotide
  modified_base 6: mod_base = OTHER; note = 2'-fluoro nucleotide
  modified_base 7: mod_base = OTHER; note = 2'-O-Methyl nucleotide
  modified_base 8: mod_base = OTHER; note = 2'-fluoro nucleotide
  modified_base 9: mod_base = OTHER; note = 2'-O-Methyl nucleotide
  modified_base 10: mod_base = OTHER; note = 2'-fluoro nucleotide
  modified_base 11: mod_base = OTHER; note = 2'-O-Methyl nucleotide
  modified_base 12: mod_base = OTHER; note = 2'-fluoro nucleotide
  modified_base 13: mod_base = OTHER; note = 2'-O-Methyl nucleotide
  modified_base 14: mod_base = OTHER; note = 2'-fluoro nucleotide
  modified_base 15: mod_base = OTHER; note = 2'-O-Methyl nucleotide
  modified_base 16: mod_base = OTHER; note = 2'-fluoro nucleotide
  modified_base 17: mod_base = OTHER; note = 2'-O-Methyl nucleotide
  modified_base 18: mod_base = OTHER; note = 2'-fluoro nucleotide
  modified_base 19: mod_base = OTHER; note = 2'-O-Methyl nucleotide
  modified_base 20: mod_base = OTHER; note = deoxy-thymine phosphorothioate
  misc_feature 1..19: note = RNA
  misc_feature 20..21: note = DNA
cggcgccatgcaggatttctt

SEQ ID NO: 1500 - DNA, 21 bp, synthetic construct
  misc_feature 1..21: note = Description of Artificial Sequence: Synthetic oligonucleotide
  source 1..21: mol_type = other DNA
  modified_base 1: mod_base = OTHER; note = 2'-O-Methyl nucleotide
  modified_base 2: mod_base = OTHER; note = 2'-O-Methyl nucleotide
  modified_base 3: mod_base = OTHER; note = 2'-fluoro nucleotide
  modified_base 4: mod_base = OTHER; note = 2'-O-Methyl nucleotide
  modified_base 5: mod_base = OTHER; note = 2'-fluoro nucleotide
  modified_base 6: mod_base = OTHER; note = 2'-O-Methyl nucleotide
  modified_base 7: mod_base = OTHER; note = 2'-fluoro nucleotide
  modified_base 8: mod_base = OTHER; note = 2'-O-Methyl nucleotide
  modified_base 9: mod_base = OTHER; note = 2'-fluoro nucleotide
  modified_base 10: mod_base = OTHER; note = 2'-O-Methyl nucleotide
  modified_base 11: mod_base = OTHER; note = 2'-fluoro nucleotide
  modified_base 12: mod_base = OTHER; note = 2'-O-Methyl nucleotide
  modified_base 13: mod_base = OTHER; note = 2'-fluoro nucleotide
  modified_base 14: mod_base = OTHER; note = 2'-O-Methyl nucleotide
  modified_base 15: mod_base = OTHER; note = 2'-fluoro nucleotide
  modified_base 16: mod_base = OTHER; note = 2'-O-Methyl nucleotide
  modified_base 17: mod_base = OTHER; note = 2'-fluoro nucleotide
  modified_base 18: mod_base = OTHER; note = 2'-O-Methyl nucleotide
  modified_base 19: mod_base = OTHER; note = 2'-fluoro nucleotide
  modified_base 20: mod_base = OTHER; note = deoxy-thymine phosphorothioate
  misc_feature 1..19: note = RNA
  misc_feature 20..21: note = DNA
aaatcctgcatggcgccgttt

SEQ ID NO: 1501 - DNA, 21 bp, synthetic construct
  misc_feature 1..21: note = Description of Artificial Sequence: Synthetic oligonucleotide
  source 1..21: mol_type = other DNA
  modified_base 1: mod_base = OTHER; note = 2'-fluoro nucleotide
  modified_base 2: mod_base = OTHER; note = 2'-fluoro nucleotide
  modified_base 3: mod_base = OTHER; note = 2'-O-Methyl nucleotide
  modified_base 4: mod_base = OTHER; note = 2'-fluoro nucleotide
  modified_base 5: mod_base = OTHER; note = 2'-O-Methyl nucleotide
  modified_base 6: mod_base = OTHER; note = 2'-fluoro nucleotide
  modified_base 7: mod_base = OTHER; note = 2'-O-Methyl nucleotide
  modified_base 8: mod_base = OTHER; note = 2'-fluoro nucleotide
  modified_base 9: mod_base = OTHER; note = 2'-O-Methyl nucleotide
  modified_base 10: mod_base = OTHER; note = 2'-fluoro nucleotide
  modified_base 11: mod_base = OTHER; note = 2'-O-Methyl nucleotide
  modified_base 12: mod_base = OTHER; note = 2'-fluoro nucleotide
  modified_base 13: mod_base = OTHER; note = 2'-O-Methyl nucleotide
  modified_base 14: mod_base = OTHER; note = 2'-fluoro nucleotide
  modified_base 15: mod_base = OTHER; note = 2'-O-Methyl nucleotide
  modified_base 16: mod_base = OTHER; note = 2'-fluoro nucleotide
  modified_base 17: mod_base = OTHER; note = 2'-O-Methyl nucleotide
  modified_base 18: mod_base = OTHER; note = 2'-fluoro nucleotide
  modified_base 19: mod_base = OTHER; note = 2'-O-Methyl nucleotide
  modified_base 20: mod_base = OTHER; note = deoxy-thymine phosphorothioate
  misc_feature 1..19: note = RNA
  misc_feature 20..21: note = DNA
acggcgccatgcaggattttt

SEQ ID NO: 1502 - DNA, 21 bp, synthetic construct
  misc_feature 1..21: note = Description of Artificial Sequence: Synthetic oligonucleotide
  source 1..21: mol_type = other DNA
  modified_base 1: mod_base = OTHER; note = 2'-O-Methyl nucleotide
  modified_base 2: mod_base = OTHER; note = 2'-O-Methyl nucleotide
  modified_base 3: mod_base = OTHER; note = 2'-fluoro nucleotide
  modified_base 4: mod_base = OTHER; note = 2'-O-Methyl nucleotide
  modified_base 5: mod_base = OTHER; note = 2'-fluoro nucleotide
  modified_base 6: mod_base = OTHER; note = 2'-O-Methyl nucleotide
  modified_base 7: mod_base = OTHER; note = 2'-fluoro nucleotide
  modified_base 8: mod_base = OTHER; note = 2'-O-Methyl nucleotide
  modified_base 9: mod_base = OTHER; note = 2'-fluoro nucleotide
  modified_base 10: mod_base = OTHER; note = 2'-O-Methyl nucleotide
  modified_base 11: mod_base = OTHER; note = 2'-fluoro nucleotide
  modified_base 12: mod_base = OTHER; note = 2'-O-Methyl nucleotide
  modified_base 13: mod_base = OTHER; note = 2'-fluoro nucleotide
  modified_base 14: mod_base = OTHER; note = 2'-O-Methyl nucleotide
  modified_base 15: mod_base = OTHER; note = 2'-fluoro nucleotide
  modified_base 16: mod_base = OTHER; note = 2'-O-Methyl nucleotide
  modified_base 17: mod_base = OTHER; note = 2'-fluoro nucleotide
  modified_base 18: mod_base = OTHER; note = 2'-O-Methyl nucleotide
  modified_base 19: mod_base = OTHER; note = 2'-fluoro nucleotide
  modified_base 20: mod_base = OTHER; note = deoxy-thymine phosphorothioate
  misc_feature 1..19: note = RNA
  misc_feature 20..21: note = DNA
aatcctgcatggcgccgtgtt

SEQ ID NO: 1503 - DNA, 21 bp, synthetic construct
  misc_feature 1..21: note = Description of Artificial Sequence: Synthetic oligonucleotide
  source 1..21: mol_type = other DNA
  modified_base 1: mod_base = OTHER; note = 2'-fluoro nucleotide
  modified_base 2: mod_base = OTHER; note = 2'-fluoro nucleotide
  modified_base 3: mod_base = OTHER; note = 2'-O-Methyl nucleotide
  modified_base 4: mod_base = OTHER; note = 2'-fluoro nucleotide
  modified_base 5: mod_base = OTHER; note = 2'-O-Methyl nucleotide
  modified_base 6: mod_base = OTHER; note = 2'-fluoro nucleotide
  modified_base 7: mod_base = OTHER; note = 2'-O-Methyl nucleotide
  modified_base 8: mod_base = OTHER; note = 2'-fluoro nucleotide
  modified_base 9: mod_base = OTHER; note = 2'-O-Methyl nucleotide
  modified_base 10: mod_base = OTHER; note = 2'-fluoro nucleotide
  modified_base 11: mod_base = OTHER; note = 2'-O-Methyl nucleotide
  modified_base 12: mod_base = OTHER; note = 2'-fluoro nucleotide
  modified_base 13: mod_base = OTHER; note = 2'-O-Methyl nucleotide
  modified_base 14: mod_base = OTHER; note = 2'-fluoro nucleotide
  modified_base 15: mod_base = OTHER; note = 2'-O-Methyl nucleotide
  modified_base 16: mod_base = OTHER; note = 2'-fluoro nucleotide
  modified_base 17: mod_base = OTHER; note = 2'-O-Methyl nucleotide
  modified_base 18: mod_base = OTHER; note = 2'-fluoro nucleotide
  modified_base 19: mod_base = OTHER; note = 2'-O-Methyl nucleotide
  modified_base 20: mod_base = OTHER; note = deoxy-thymine phosphorothioate
  misc_feature 1..19: note = RNA
  misc_feature 20..21: note = DNA
cacggcgccatgcaggatttt

SEQ ID NO: 1504 - DNA, 21 bp, synthetic construct
  misc_feature 1..21: note = Description of Artificial Sequence: Synthetic oligonucleotide
  source 1..21: mol_type = other DNA
  modified_base 1: mod_base = OTHER; note = 2'-O-Methyl nucleotide
  modified_base 2: mod_base = OTHER; note = 2'-O-Methyl nucleotide
  modified_base 3: mod_base = OTHER; note = 2'-fluoro nucleotide
  modified_base 4: mod_base = OTHER; note = 2'-O-Methyl nucleotide
  modified_base 5: mod_base = OTHER; note = 2'-fluoro nucleotide
  modified_base 6: mod_base = OTHER; note = 2'-O-Methyl nucleotide
  modified_base 7: mod_base = OTHER; note = 2'-fluoro nucleotide
  modified_base 8: mod_base = OTHER; note = 2'-O-Methyl nucleotide
  modified_base 9: mod_base = OTHER; note = 2'-fluoro nucleotide
  modified_base 10: mod_base = OTHER; note = 2'-O-Methyl nucleotide
  modified_base 11: mod_base = OTHER; note = 2'-fluoro nucleotide
  modified_base 12: mod_base = OTHER; note = 2'-O-Methyl nucleotide
  modified_base 13: mod_base = OTHER; note = 2'-fluoro nucleotide
  modified_base 14: mod_base = OTHER; note = 2'-O-Methyl nucleotide
  modified_base 15: mod_base = OTHER; note = 2'-fluoro nucleotide
  modified_base 16: mod_base = OTHER; note = 2'-O-Methyl nucleotide
  modified_base 17: mod_base = OTHER; note = 2'-fluoro nucleotide
  modified_base 18: mod_base = OTHER; note = 2'-O-Methyl nucleotide
  modified_base 19: mod_base = OTHER; note = 2'-fluoro nucleotide
  modified_base 20: mod_base = OTHER; note = deoxy-thymine phosphorothioate
  misc_feature 1..19: note = RNA
  misc_feature 20..21: note = DNA
tcctgcatggcgccgtgcgtt

SEQ ID NO: 1505 - DNA, 21 bp, synthetic construct
  misc_feature 1..21: note = Description of Artificial Sequence: Synthetic oligonucleotide
  source 1..21: mol_type = other DNA
  modified_base 1: mod_base = OTHER; note = 2'-fluoro nucleotide
  modified_base 2: mod_base = OTHER; note = 2'-fluoro nucleotide
  modified_base 3: mod_base = OTHER; note = 2'-O-Methyl nucleotide
  modified_base 4: mod_base = OTHER; note = 2'-fluoro nucleotide
  modified_base 5: mod_base = OTHER; note = 2'-O-Methyl nucleotide
  modified_base 6: mod_base = OTHER; note = 2'-fluoro nucleotide
  modified_base 7: mod_base = OTHER; note = 2'-O-Methyl nucleotide
  modified_base 8: mod_base = OTHER; note = 2'-fluoro nucleotide
  modified_base 9: mod_base = OTHER; note = 2'-O-Methyl nucleotide
  modified_base 10: mod_base = OTHER; note = 2'-fluoro nucleotide
  modified_base 11: mod_base = OTHER; note = 2'-O-Methyl nucleotide
  modified_base 12: mod_base = OTHER; note = 2'-fluoro nucleotide
  modified_base 13: mod_base = OTHER; note = 2'-O-Methyl nucleotide
  modified_base 14: mod_base = OTHER; note = 2'-fluoro nucleotide
  modified_base 15: mod_base = OTHER; note = 2'-O-Methyl nucleotide
  modified_base 16: mod_base = OTHER; note = 2'-fluoro nucleotide
  modified_base 17: mod_base = OTHER; note = 2'-O-Methyl nucleotide
  modified_base 18: mod_base = OTHER; note = 2'-fluoro nucleotide
  modified_base 19: mod_base = OTHER; note = 2'-O-Methyl nucleotide
  modified_base 20: mod_base = OTHER; note = deoxy-thymine phosphorothioate
  misc_feature 1..19: note = RNA
  misc_feature 20..21: note = DNA
cgcacggcgccatgcaggatt

SEQ ID NO: 1506 - DNA, 21 bp, synthetic construct
  misc_feature 1..21: note = Description of Artificial Sequence: Synthetic oligonucleotide
  source 1..21: mol_type = other DNA
  modified_base 1: mod_base = OTHER; note = 2'-O-Methyl nucleotide
  modified_base 2: mod_base = OTHER; note = 2'-O-Methyl nucleotide
  modified_base 3: mod_base = OTHER; note = 2'-fluoro nucleotide
  modified_base 4: mod_base = OTHER; note = 2'-O-Methyl nucleotide
  modified_base 5: mod_base = OTHER; note = 2'-fluoro nucleotide
  modified_base 6: mod_base = OTHER; note = 2'-O-Methyl nucleotide
  modified_base 7: mod_base = OTHER; note = 2'-fluoro nucleotide
  modified_base 8: mod_base = OTHER; note = 2'-O-Methyl nucleotide
  modified_base 9: mod_base = OTHER; note = 2'-fluoro nucleotide
  modified_base 10: mod_base = OTHER; note = 2'-O-Methyl nucleotide
  modified_base 11: mod_base = OTHER; note = 2'-fluoro nucleotide
  modified_base 12: mod_base = OTHER; note = 2'-O-Methyl nucleotide
  modified_base 13: mod_base = OTHER; note = 2'-fluoro nucleotide
  modified_base 14: mod_base = OTHER; note = 2'-O-Methyl nucleotide
  modified_base 15: mod_base = OTHER; note = 2'-fluoro nucleotide
  modified_base 16: mod_base = OTHER; note = 2'-O-Methyl nucleotide
  modified_base 17: mod_base = OTHER; note = 2'-fluoro nucleotide
  modified_base 18: mod_base = OTHER; note = 2'-O-Methyl nucleotide
  modified_base 19: mod_base = OTHER; note = 2'-fluoro nucleotide
  modified_base 20: mod_base = OTHER; note = deoxy-thymine phosphorothioate
  misc_feature 1..19: note = RNA
  misc_feature 20..21: note = DNA
ctgcatggcgccgtgcggttt

SEQ ID NO: 1507 - DNA, 21 bp, synthetic construct
  misc_feature 1..21: note = Description of Artificial Sequence: Synthetic oligonucleotide
  source 1..21: mol_type = other DNA
  modified_base 1: mod_base = OTHER; note = 2'-fluoro nucleotide
  modified_base 2: mod_base = OTHER; note = 2'-fluoro nucleotide
  modified_base 3: mod_base = OTHER; note = 2'-O-Methyl nucleotide
  modified_base 4: mod_base = OTHER; note = 2'-fluoro nucleotide
  modified_base 5: mod_base = OTHER; note = 2'-O-Methyl nucleotide
  modified_base 6: mod_base = OTHER; note = 2'-fluoro nucleotide
  modified_base 7: mod_base = OTHER; note = 2'-O-Methyl nucleotide
  modified_base 8: mod_base = OTHER; note = 2'-fluoro nucleotide
  modified_base 9: mod_base = OTHER; note = 2'-O-Methyl nucleotide
  modified_base 10: mod_base = OTHER; note = 2'-fluoro nucleotide
  modified_base 11: mod_base = OTHER; note = 2'-O-Methyl nucleotide
  modified_base 12: mod_base = OTHER; note = 2'-fluoro nucleotide
  modified_base 13: mod_base = OTHER; note = 2'-O-Methyl nucleotide
  modified_base 14: mod_base = OTHER; note = 2'-fluoro nucleotide
  modified_base 15: mod_base = OTHER; note = 2'-O-Methyl nucleotide
  modified_base 16: mod_base = OTHER; note = 2'-fluoro nucleotide
  modified_base 17: mod_base = OTHER; note = 2'-O-Methyl nucleotide
  modified_base 18: mod_base = OTHER; note = 2'-fluoro nucleotide
  modified_base 19: mod_base = OTHER; note = 2'-O-Methyl nucleotide
  modified_base 20: mod_base = OTHER; note = deoxy-thymine phosphorothioate
  misc_feature 1..19: note = RNA
  misc_feature 20..21: note = DNA
accgcacggcgccatgcagtt

SEQ ID NO: 1508 - DNA, 21 bp, synthetic construct
  misc_feature 1..21: note = Description of Artificial Sequence: Synthetic oligonucleotide
  source 1..21: mol_type = other DNA
  modified_base 1: mod_base = OTHER; note = 2'-O-Methyl nucleotide
  modified_base 2: mod_base = OTHER; note = 2'-O-Methyl nucleotide
  modified_base 3: mod_base = OTHER; note = 2'-fluoro nucleotide
  modified_base 4: mod_base = OTHER; note = 2'-O-Methyl nucleotide
  modified_base 5: mod_base = OTHER; note = 2'-fluoro nucleotide
  modified_base 6: mod_base = OTHER; note = 2'-O-Methyl nucleotide
  modified_base 7: mod_base = OTHER; note = 2'-fluoro nucleotide
  modified_base 8: mod_base = OTHER; note = 2'-O-Methyl nucleotide
  modified_base 9: mod_base = OTHER; note = 2'-fluoro nucleotide
  modified_base 10: mod_base = OTHER; note = 2'-O-Methyl nucleotide
  modified_base 11: mod_base = OTHER; note = 2'-fluoro nucleotide
  modified_base 12: mod_base = OTHER; note = 2'-O-Methyl nucleotide
  modified_base 13: mod_base = OTHER; note = 2'-fluoro nucleotide
  modified_base 14: mod_base = OTHER; note = 2'-O-Methyl nucleotide
  modified_base 15: mod_base = OTHER; note = 2'-fluoro nucleotide
  modified_base 16: mod_base = OTHER; note = 2'-O-Methyl nucleotide
  modified_base 17: mod_base = OTHER; note = 2'-fluoro nucleotide
  modified_base 18: mod_base = OTHER; note = 2'-O-Methyl nucleotide
  modified_base 19: mod_base = OTHER; note = 2'-fluoro nucleotide
  modified_base 20: mod_base = OTHER; note = deoxy-thymine phosphorothioate
  misc_feature 1..19: note = RNA
  misc_feature 20..21: note = DNA
tgcatggcgccgtgcggtttt

SEQ ID NO: 1509 - DNA, 21 bp, synthetic construct
  misc_feature 1..21: note = Description of Artificial Sequence: Synthetic oligonucleotide
  source 1..21: mol_type = other DNA
  modified_base 1: mod_base = OTHER; note = 2'-fluoro nucleotide
  modified_base 2: mod_base = OTHER; note = 2'-fluoro nucleotide
  modified_base 3: mod_base = OTHER; note = 2'-O-Methyl nucleotide
  modified_base 4: mod_base = OTHER; note = 2'-fluoro nucleotide
  modified_base 5: mod_base = OTHER; note = 2'-O-Methyl nucleotide
  modified_base 6: mod_base = OTHER; note = 2'-fluoro nucleotide
  modified_base 7: mod_base = OTHER; note = 2'-O-Methyl nucleotide
  modified_base 8: mod_base = OTHER; note = 2'-fluoro nucleotide
  modified_base 9: mod_base = OTHER; note = 2'-O-Methyl nucleotide
  modified_base 10: mod_base = OTHER; note = 2'-fluoro nucleotide
  modified_base 11: mod_base = OTHER; note = 2'-O-Methyl nucleotide
  modified_base 12: mod_base = OTHER; note = 2'-fluoro nucleotide
  modified_base 13: mod_base = OTHER; note = 2'-O-Methyl nucleotide
  modified_base 14: mod_base = OTHER; note = 2'-fluoro nucleotide
  modified_base 15: mod_base = OTHER; note = 2'-O-Methyl nucleotide
  modified_base 16: mod_base = OTHER; note = 2'-fluoro nucleotide
  modified_base 17: mod_base = OTHER; note = 2'-O-Methyl nucleotide
  modified_base 18: mod_base = OTHER; note = 2'-fluoro nucleotide
  modified_base 19: mod_base = OTHER; note = 2'-O-Methyl nucleotide
  modified_base 20: mod_base = OTHER; note = deoxy-thymine phosphorothioate
  misc_feature 1..19: note = RNA
  misc_feature 20..21: note = DNA
aaccgcacggcgccatgcatt

SEQ ID NO: 1510 - DNA, 21 bp, synthetic construct
  misc_feature 1..21: note = Description of Artificial Sequence: Synthetic oligonucleotide
  source 1..21: mol_type = other DNA
  modified_base 1: mod_base = OTHER; note = 2'-O-Methyl nucleotide
  modified_base 2: mod_base = OTHER; note = 2'-O-Methyl nucleotide
  modified_base 3: mod_base = OTHER; note = 2'-fluoro nucleotide
  modified_base 4: mod_base = OTHER; note = 2'-O-Methyl nucleotide
  modified_base 5: mod_base = OTHER; note = 2'-fluoro nucleotide
  modified_base 6: mod_base = OTHER; note = 2'-O-Methyl nucleotide
  modified_base 7: mod_base = OTHER; note = 2'-fluoro nucleotide
  modified_base 8: mod_base = OTHER; note = 2'-O-Methyl nucleotide
  modified_base 9: mod_base = OTHER; note = 2'-fluoro nucleotide
  modified_base 10: mod_base = OTHER; note = 2'-O-Methyl nucleotide
  modified_base 11: mod_base = OTHER; note = 2'-fluoro nucleotide
  modified_base 12: mod_base = OTHER; note = 2'-O-Methyl nucleotide
  modified_base 13: mod_base = OTHER; note = 2'-fluoro nucleotide
  modified_base 14: mod_base = OTHER; note = 2'-O-Methyl nucleotide
  modified_base 15: mod_base = OTHER; note = 2'-fluoro nucleotide
  modified_base 16: mod_base = OTHER; note = 2'-O-Methyl nucleotide
  modified_base 17: mod_base = OTHER; note = 2'-fluoro nucleotide
  modified_base 18: mod_base = OTHER; note = 2'-O-Methyl nucleotide
  modified_base 19: mod_base = OTHER; note = 2'-fluoro nucleotide
  modified_base 20: mod_base = OTHER; note = deoxy-thymine phosphorothioate
  misc_feature 1..19: note = RNA
  misc_feature 20..21: note = DNA
gcatggcgccgtgcggttctt

SEQ ID NO: 1511 - DNA, 21 bp, synthetic construct
  misc_feature 1..21: note = Description of Artificial Sequence: Synthetic oligonucleotide
  source 1..21: mol_type = other DNA
  modified_base 1: mod_base = OTHER; note = 2'-fluoro nucleotide
  modified_base 2: mod_base = OTHER; note = 2'-fluoro nucleotide
  modified_base 3: mod_base = OTHER; note = 2'-O-Methyl nucleotide
  modified_base 4: mod_base = OTHER; note = 2'-fluoro nucleotide
  modified_base 5: mod_base = OTHER; note = 2'-O-Methyl nucleotide
  modified_base 6: mod_base = OTHER; note = 2'-fluoro nucleotide
  modified_base 7: mod_base = OTHER; note = 2'-O-Methyl nucleotide
  modified_base 8: mod_base = OTHER; note = 2'-fluoro nucleotide
  modified_base 9: mod_base = OTHER; note = 2'-O-Methyl nucleotide
  modified_base 10: mod_base = OTHER; note = 2'-fluoro nucleotide
  modified_base 11: mod_base = OTHER; note = 2'-O-Methyl nucleotide
  modified_base 12: mod_base = OTHER; note = 2'-fluoro nucleotide
  modified_base 13: mod_base = OTHER; note = 2'-O-Methyl nucleotide
  modified_base 14: mod_base = OTHER; note = 2'-fluoro nucleotide
  modified_base 15: mod_base = OTHER; note = 2'-O-Methyl nucleotide
  modified_base 16: mod_base = OTHER; note = 2'-fluoro nucleotide
  modified_base 17: mod_base = OTHER; note = 2'-O-Methyl nucleotide
  modified_base 18: mod_base = OTHER; note = 2'-fluoro nucleotide
  modified_base 19: mod_base = OTHER; note = 2'-O-Methyl nucleotide
  modified_base 20: mod_base = OTHER; note = deoxy-thymine phosphorothioate
  misc_feature 1..19: note = RNA
  misc_feature 20..21: note = DNA
gaaccgcacggcgccatgctt

SEQ ID NO: 1512 - DNA, 21 bp, synthetic construct
  misc_feature 1..21: note = Description of Artificial Sequence: Synthetic oligonucleotide
  source 1..21: mol_type = other DNA
  modified_base 1: mod_base = OTHER; note = 2'-O-Methyl nucleotide
  modified_base 2: mod_base = OTHER; note = 2'-O-Methyl nucleotide
  modified_base 3: mod_base = OTHER; note = 2'-fluoro nucleotide
  modified_base 4: mod_base = OTHER; note = 2'-O-Methyl nucleotide
  modified_base 5: mod_base = OTHER; note = 2'-fluoro nucleotide
  modified_base 6: mod_base = OTHER; note = 2'-O-Methyl nucleotide
  modified_base 7: mod_base = OTHER; note = 2'-fluoro nucleotide
  modified_base 8: mod_base = OTHER; note = 2'-O-Methyl nucleotide
  modified_base 9: mod_base = OTHER; note = 2'-fluoro nucleotide
  modified_base 10: mod_base = OTHER; note = 2'-O-Methyl nucleotide
  modified_base 11: mod_base = OTHER; note = 2'-fluoro nucleotide
  modified_base 12: mod_base = OTHER; note = 2'-O-Methyl nucleotide
  modified_base 13: mod_base = OTHER; note = 2'-fluoro nucleotide
  modified_base 14: mod_base = OTHER; note = 2'-O-Methyl nucleotide
  modified_base 15: mod_base = OTHER; note = 2'-fluoro nucleotide
  modified_base 16: mod_base = OTHER; note = 2'-O-Methyl nucleotide
  modified_base 17: mod_base = OTHER; note = 2'-fluoro nucleotide
  modified_base 18: mod_base = OTHER; note = 2'-O-Methyl nucleotide
  modified_base 19: mod_base = OTHER; note = 2'-fluoro nucleotide
  modified_base 20: mod_base = OTHER; note = deoxy-thymine phosphorothioate
  misc_feature 1..19: note = RNA
  misc_feature 20..21: note = DNA
atggcgccgtgcggttcagtt

SEQ ID NO: 1513 - DNA, 21 bp, synthetic construct
  misc_feature 1..21: note = Description of Artificial Sequence: Synthetic oligonucleotide
  source 1..21: mol_type = other DNA
  modified_base 1: mod_base = OTHER; note = 2'-fluoro nucleotide
  modified_base 2: mod_base = OTHER; note = 2'-fluoro nucleotide
  modified_base 3: mod_base = OTHER; note = 2'-O-Methyl nucleotide
  modified_base 4: mod_base = OTHER; note = 2'-fluoro nucleotide
  modified_base 5: mod_base = OTHER; note = 2'-O-Methyl nucleotide
  modified_base 6: mod_base = OTHER; note = 2'-fluoro nucleotide
  modified_base 7: mod_base = OTHER; note = 2'-O-Methyl nucleotide
  modified_base 8: mod_base = OTHER; note = 2'-fluoro nucleotide
  modified_base 9: mod_base = OTHER; note = 2'-O-Methyl nucleotide
  modified_base 10: mod_base = OTHER; note = 2'-fluoro nucleotide
  modified_base 11: mod_base = OTHER; note = 2'-O-Methyl nucleotide
  modified_base 12: mod_base = OTHER; note = 2'-fluoro nucleotide
  modified_base 13: mod_base = OTHER; note = 2'-O-Methyl nucleotide
  modified_base 14: mod_base = OTHER; note = 2'-fluoro nucleotide
  modified_base 15: mod_base = OTHER; note = 2'-O-Methyl nucleotide
  modified_base 16: mod_base = OTHER; note = 2'-fluoro nucleotide
  modified_base 17: mod_base = OTHER; note = 2'-O-Methyl nucleotide
  modified_base 18: mod_base = OTHER; note = 2'-fluoro nucleotide
  modified_base 19: mod_base = OTHER; note = 2'-O-Methyl nucleotide
  modified_base 20: mod_base = OTHER; note = deoxy-thymine phosphorothioate
  misc_feature 1..19: note = RNA
  misc_feature 20..21: note = DNA
ctgaaccgcacggcgccattt

SEQ ID NO: 1514 - DNA, 21 bp, synthetic construct
  misc_feature 1..21: note = Description of Artificial Sequence: Synthetic oligonucleotide
  source 1..21: mol_type = other DNA
  modified_base 1: mod_base = OTHER; note = 2'-O-Methyl nucleotide
  modified_base 2: mod_base = OTHER; note = 2'-O-Methyl nucleotide
  modified_base 3: mod_base = OTHER; note = 2'-fluoro nucleotide
  modified_base 4: mod_base = OTHER; note = 2'-O-Methyl nucleotide
  modified_base 5: mod_base = OTHER; note = 2'-fluoro nucleotide
  modified_base 6: mod_base = OTHER; note = 2'-O-Methyl nucleotide
  modified_base 7: mod_base = OTHER; note = 2'-fluoro nucleotide
  modified_base 8: mod_base = OTHER; note = 2'-O-Methyl nucleotide
  modified_base 9: mod_base = OTHER; note = 2'-fluoro nucleotide
  modified_base 10: mod_base = OTHER; note = 2'-O-Methyl nucleotide
  modified_base 11: mod_base = OTHER; note = 2'-fluoro nucleotide
  modified_base 12: mod_base = OTHER; note = 2'-O-Methyl nucleotide
  modified_base 13: mod_base = OTHER; note = 2'-fluoro nucleotide
  modified_base 14: mod_base = OTHER; note = 2'-O-Methyl nucleotide
  modified_base 15: mod_base = OTHER; note = 2'-fluoro nucleotide
  modified_base 16: mod_base = OTHER; note = 2'-O-Methyl nucleotide
  modified_base 17: mod_base = OTHER; note = 2'-fluoro nucleotide
  modified_base 18: mod_base = OTHER; note = 2'-O-Methyl nucleotide
  modified_base 19: mod_base = OTHER; note = 2'-fluoro nucleotide
  modified_base 20: mod_base = OTHER; note = deoxy-thymine phosphorothioate
  misc_feature 1..19: note = RNA
  misc_feature 20..21: note = DNA
tggcgccgtgcggttcagctt

SEQ ID NO: 1515 - DNA, 21 bp, synthetic construct
  misc_feature 1..21: note = Description of Artificial Sequence: Synthetic oligonucleotide
  source 1..21: mol_type = other DNA
  modified_base 1: mod_base = OTHER; note = 2'-fluoro nucleotide
  modified_base 2: mod_base = OTHER; note = 2'-fluoro nucleotide
  modified_base 3: mod_base = OTHER; note = 2'-O-Methyl nucleotide
  modified_base 4: mod_base = OTHER; note = 2'-fluoro nucleotide
  modified_base 5: mod_base = OTHER; note = 2'-O-Methyl nucleotide
  modified_base 6: mod_base = OTHER; note = 2'-fluoro nucleotide
  modified_base 7: mod_base = OTHER; note = 2'-O-Methyl nucleotide
  modified_base 8: mod_base = OTHER; note = 2'-fluoro nucleotide
  modified_base 9: mod_base = OTHER; note = 2'-O-Methyl nucleotide
  modified_base 10: mod_base = OTHER; note = 2'-fluoro nucleotide
  modified_base 11: mod_base = OTHER; note = 2'-O-Methyl nucleotide
  modified_base 12: mod_base = OTHER; note = 2'-fluoro nucleotide
  modified_base 13: mod_base = OTHER; note = 2'-O-Methyl nucleotide
  modified_base 14: mod_base = OTHER; note = 2'-fluoro nucleotide
  modified_base 15: mod_base = OTHER; note = 2'-O-Methyl nucleotide
  modified_base 16: mod_base = OTHER; note = 2'-fluoro nucleotide
  modified_base 17: mod_base = OTHER; note = 2'-O-Methyl nucleotide
  modified_base 18: mod_base = OTHER; note = 2'-fluoro nucleotide
  modified_base 19: mod_base = OTHER; note = 2'-O-Methyl nucleotide
  modified_base 20: mod_base = OTHER; note = deoxy-thymine phosphorothioate
  misc_feature 1..19: note = RNA
  misc_feature 20..21: note = DNA
gctgaaccgcacggcgccatt

SEQ ID NO: 1516 - DNA, 21 bp, synthetic construct
  misc_feature 1..21: note = Description of Artificial Sequence: Synthetic oligonucleotide
  source 1..21: mol_type = other DNA
  modified_base 1: mod_base = OTHER; note = 2'-O-Methyl nucleotide
  modified_base 2: mod_base = OTHER; note = 2'-O-Methyl nucleotide
  modified_base 3: mod_base = OTHER; note = 2'-fluoro nucleotide
  modified_base 4: mod_base = OTHER; note = 2'-O-Methyl nucleotide
  modified_base 5: mod_base = OTHER; note = 2'-fluoro nucleotide
  modified_base 6: mod_base = OTHER; note = 2'-O-Methyl nucleotide
  modified_base 7: mod_base = OTHER; note = 2'-fluoro nucleotide
  modified_base 8: mod_base = OTHER; note = 2'-O-Methyl nucleotide
  modified_base 9: mod_base = OTHER; note = 2'-fluoro nucleotide
  modified_base 10: mod_base = OTHER; note = 2'-O-Methyl nucleotide
  modified_base 11: mod_base = OTHER; note = 2'-fluoro nucleotide
  modified_base 12: mod_base = OTHER; note = 2'-O-Methyl nucleotide
  modified_base 13: mod_base = OTHER; note = 2'-fluoro nucleotide
  modified_base 14: mod_base = OTHER; note = 2'-O-Methyl nucleotide
  modified_base 15: mod_base = OTHER; note = 2'-fluoro nucleotide
  modified_base 16: mod_base = OTHER; note = 2'-O-Methyl nucleotide
  modified_base 17: mod_base = OTHER; note = 2'-fluoro nucleotide
  modified_base 18: mod_base = OTHER; note = 2'-O-Methyl nucleotide
  modified_base 19: mod_base = OTHER; note = 2'-fluoro nucleotide
  modified_base 20: mod_base = OTHER; note = deoxy-thymine phosphorothioate
  misc_feature 1..19: note = RNA
  misc_feature 20..21: note = DNA
ggcgccgtgcggttcagcatt

SEQ ID NO: 1517 - DNA, 21 bp, synthetic construct
  misc_feature 1..21: note = Description of Artificial Sequence: Synthetic oligonucleotide
  source 1..21: mol_type = other DNA
  modified_base 1: mod_base = OTHER; note = 2'-fluoro nucleotide
  modified_base 2: mod_base = OTHER; note = 2'-fluoro nucleotide
  modified_base 3: mod_base = OTHER; note = 2'-O-Methyl nucleotide
  modified_base 4: mod_base = OTHER; note = 2'-fluoro nucleotide
  modified_base 5: mod_base = OTHER; note = 2'-O-Methyl nucleotide
  modified_base 6: mod_base = OTHER; note = 2'-fluoro nucleotide
  modified_base 7: mod_base = OTHER; note = 2'-O-Methyl nucleotide
  modified_base 8: mod_base = OTHER; note = 2'-fluoro nucleotide
  modified_base 9: mod_base = OTHER; note = 2'-O-Methyl nucleotide
  modified_base 10: mod_base = OTHER; note = 2'-fluoro nucleotide
  modified_base 11: mod_base = OTHER; note = 2'-O-Methyl nucleotide
  modified_base 12: mod_base = OTHER; note = 2'-fluoro nucleotide
  modified_base 13: mod_base = OTHER; note = 2'-O-Methyl nucleotide
  modified_base 14: mod_base = OTHER; note = 2'-fluoro nucleotide
  modified_base 15: mod_base = OTHER; note = 2'-O-Methyl nucleotide
  modified_base 16: mod_base = OTHER; note = 2'-fluoro nucleotide
  modified_base 17: mod_base = OTHER; note = 2'-O-Methyl nucleotide
  modified_base 18: mod_base = OTHER; note = 2'-fluoro nucleotide
  modified_base 19: mod_base = OTHER; note = 2'-O-Methyl nucleotide
  modified_base 20: mod_base = OTHER; note = deoxy-thymine phosphorothioate
  misc_feature 1..19: note = RNA
  misc_feature 20..21: note = DNA
tgctgaaccgcacggcgcctt

SEQ ID NO: 1518 - DNA, 21 bp, synthetic construct
  misc_feature 1..21: note = Description of Artificial Sequence: Synthetic oligonucleotide
  source 1..21: mol_type = other DNA
  modified_base 1: mod_base = OTHER; note = 2'-O-Methyl nucleotide
  modified_base 2: mod_base = OTHER; note = 2'-O-Methyl nucleotide
  modified_base 3: mod_base = OTHER; note = 2'-fluoro nucleotide
  modified_base 4: mod_base = OTHER; note = 2'-O-Methyl nucleotide
  modified_base 5: mod_base = OTHER; note = 2'-fluoro nucleotide
  modified_base 6: mod_base = OTHER; note = 2'-O-Methyl nucleotide
  modified_base 7: mod_base = OTHER; note = 2'-fluoro nucleotide
  modified_base 8: mod_base = OTHER; note = 2'-O-Methyl nucleotide
  modified_base 9: mod_base = OTHER; note = 2'-fluoro nucleotide
  modified_base 10: mod_base = OTHER; note = 2'-O-Methyl nucleotide
  modified_base 11: mod_base = OTHER; note = 2'-fluoro nucleotide
  modified_base 12: mod_base = OTHER; note = 2'-O-Methyl nucleotide
  modified_base 13: mod_base = OTHER; note = 2'-fluoro nucleotide
  modified_base 14: mod_base = OTHER; note = 2'-O-Methyl nucleotide
  modified_base 15: mod_base = OTHER; note = 2'-fluoro nucleotide
  modified_base 16: mod_base = OTHER; note = 2'-O-Methyl nucleotide
  modified_base 17: mod_base = OTHER; note = 2'-fluoro nucleotide
  modified_base 18: mod_base = OTHER; note = 2'-O-Methyl nucleotide
  modified_base 19: mod_base = OTHER; note = 2'-fluoro nucleotide
  modified_base 20: mod_base = OTHER; note = deoxy-thymine phosphorothioate
  misc_feature 1..19: note = RNA
  misc_feature 20..21: note = DNA
gcgccgtgcggttcagcaatt

SEQ ID NO: 1519 - DNA, 21 bp, synthetic construct
  misc_feature 1..21: note = Description of Artificial Sequence: Synthetic oligonucleotide
  source 1..21: mol_type = other DNA
  modified_base 1: mod_base = OTHER; note = 2'-fluoro nucleotide
  modified_base 2: mod_base = OTHER; note = 2'-fluoro nucleotide
  modified_base 3: mod_base = OTHER; note = 2'-O-Methyl nucleotide
  modified_base 4: mod_base = OTHER; note = 2'-fluoro nucleotide
  modified_base 5: mod_base = OTHER; note = 2'-O-Methyl nucleotide
  modified_base 6: mod_base = OTHER; note = 2'-fluoro nucleotide
  modified_base 7: mod_base = OTHER; note = 2'-O-Methyl nucleotide
  modified_base 8: mod_base = OTHER; note = 2'-fluoro nucleotide
  modified_base 9: mod_base = OTHER; note = 2'-O-Methyl nucleotide
  modified_base 10: mod_base = OTHER; note = 2'-fluoro nucleotide
  modified_base 11: mod_base = OTHER; note = 2'-O-Methyl nucleotide
  modified_base 12: mod_base = OTHER; note = 2'-fluoro nucleotide
  modified_base 13: mod_base = OTHER; note = 2'-O-Methyl nucleotide
  modified_base 14: mod_base = OTHER; note = 2'-fluoro nucleotide
  modified_base 15: mod_base = OTHER; note = 2'-O-Methyl nucleotide
  modified_base 16: mod_base = OTHER; note = 2'-fluoro nucleotide
  modified_base 17: mod_base = OTHER; note = 2'-O-Methyl nucleotide
  modified_base 18: mod_base = OTHER; note = 2'-fluoro nucleotide
  modified_base 19: mod_base = OTHER; note = 2'-O-Methyl nucleotide
  modified_base 20: mod_base = OTHER; note = deoxy-thymine phosphorothioate
  misc_feature 1..19: note = RNA
  misc_feature 20..21: note = DNA
ttgctgaaccgcacggcgctt

SEQ ID NO: 1520 - DNA, 21 bp, synthetic construct
  misc_feature 1..21: note = Description of Artificial Sequence: Synthetic oligonucleotide
  source 1..21: mol_type = other DNA
  modified_base 1: mod_base = OTHER; note = 2'-O-Methyl nucleotide
  modified_base 2: mod_base = OTHER; note = 2'-O-Methyl nucleotide
  modified_base 3: mod_base = OTHER; note = 2'-fluoro nucleotide
  modified_base 4: mod_base = OTHER; note = 2'-O-Methyl nucleotide
  modified_base 5: mod_base = OTHER; note = 2'-fluoro nucleotide
  modified_base 6: mod_base = OTHER; note = 2'-O-Methyl nucleotide
  modified_base 7: mod_base = OTHER; note = 2'-fluoro nucleotide
  modified_base 8: mod_base = OTHER; note = 2'-O-Methyl nucleotide
  modified_base 9: mod_base = OTHER; note = 2'-fluoro nucleotide
  modified_base 10: mod_base = OTHER; note = 2'-O-Methyl nucleotide
  modified_base 11: mod_base = OTHER; note = 2'-fluoro nucleotide
  modified_base 12: mod_base = OTHER; note = 2'-O-Methyl nucleotide
  modified_base 13: mod_base = OTHER; note = 2'-fluoro nucleotide
  modified_base 14: mod_base = OTHER; note = 2'-O-Methyl nucleotide
  modified_base 15: mod_base = OTHER; note = 2'-fluoro nucleotide
  modified_base 16: mod_base = OTHER; note = 2'-O-Methyl nucleotide
  modified_base 17: mod_base = OTHER; note = 2'-fluoro nucleotide
  modified_base 18: mod_base = OTHER; note = 2'-O-Methyl nucleotide
  modified_base 19: mod_base = OTHER; note = 2'-fluoro nucleotide
  modified_base 20: mod_base = OTHER; note = deoxy-thymine phosphorothioate
  misc_feature 1..19: note = RNA
  misc_feature 20..21: note = DNA
cgccgtgcggttcagcaactt

SEQ ID NO: 1521 - DNA, 21 bp, synthetic construct
  misc_feature 1..21: note = Description of Artificial Sequence: Synthetic oligonucleotide
  source 1..21: mol_type = other DNA
  modified_base 1: mod_base = OTHER; note = 2'-fluoro nucleotide
  modified_base 2: mod_base = OTHER; note = 2'-fluoro nucleotide
  modified_base 3: mod_base = OTHER; note = 2'-O-Methyl nucleotide
  modified_base 4: mod_base = OTHER; note = 2'-fluoro nucleotide
  modified_base 5: mod_base = OTHER; note = 2'-O-Methyl nucleotide
  modified_base 6: mod_base = OTHER; note = 2'-fluoro nucleotide
  modified_base 7: mod_base = OTHER; note = 2'-O-Methyl nucleotide
  modified_base 8: mod_base = OTHER; note = 2'-fluoro nucleotide
  modified_base 9: mod_base = OTHER; note = 2'-O-Methyl nucleotide
  modified_base 10: mod_base = OTHER; note = 2'-fluoro nucleotide
  modified_base 11: mod_base = OTHER; note = 2'-O-Methyl nucleotide
  modified_base 12: mod_base = OTHER; note = 2'-fluoro nucleotide
  modified_base 13: mod_base = OTHER; note = 2'-O-Methyl nucleotide
  modified_base 14: mod_base = OTHER; note = 2'-fluoro nucleotide
  modified_base 15: mod_base = OTHER; note = 2'-O-Methyl nucleotide
  modified_base 16: mod_base = OTHER; note = 2'-fluoro nucleotide
  modified_base 17: mod_base = OTHER; note = 2'-O-Methyl nucleotide
  modified_base 18: mod_base = OTHER; note = 2'-fluoro nucleotide
  modified_base 19: mod_base = OTHER; note = 2'-O-Methyl nucleotide
  modified_base 20: mod_base = OTHER; note = deoxy-thymine phosphorothioate
  misc_feature 1..19: note = RNA
  misc_feature 20..21: note = DNA
gttgctgaaccgcacggcgtt

SEQ ID NO: 1522 - DNA, 21 bp, synthetic construct
  misc_feature 1..21: note = Description of Artificial Sequence: Synthetic oligonucleotide
  source 1..21: mol_type = other DNA
  modified_base 1: mod_base = OTHER; note = 2'-O-Methyl nucleotide
  modified_base 2: mod_base = OTHER; note = 2'-O-Methyl nucleotide
  modified_base 3: mod_base = OTHER; note = 2'-fluoro nucleotide
  modified_base 4: mod_base = OTHER; note = 2'-O-Methyl nucleotide
  modified_base 5: mod_base = OTHER; note = 2'-fluoro nucleotide
  modified_base 6: mod_base = OTHER; note = 2'-O-Methyl nucleotide
  modified_base 7: mod_base = OTHER; note = 2'-fluoro nucleotide
  modified_base 8: mod_base = OTHER; note = 2'-O-Methyl nucleotide
  modified_base 9: mod_base = OTHER; note = 2'-fluoro nucleotide
  modified_base 10: mod_base = OTHER; note = 2'-O-Methyl nucleotide
  modified_base 11: mod_base = OTHER; note = 2'-fluoro nucleotide
  modified_base 12: mod_base = OTHER; note = 2'-O-Methyl nucleotide
  modified_base 13: mod_base = OTHER; note = 2'-fluoro nucleotide
  modified_base 14: mod_base = OTHER; note = 2'-O-Methyl nucleotide
  modified_base 15: mod_base = OTHER; note = 2'-fluoro nucleotide
  modified_base 16: mod_base = OTHER; note = 2'-O-Methyl nucleotide
  modified_base 17: mod_base = OTHER; note = 2'-fluoro nucleotide
  modified_base 18: mod_base = OTHER; note = 2'-O-Methyl nucleotide
  modified_base 19: mod_base = OTHER; note = 2'-fluoro nucleotide
  modified_base 20: mod_base = OTHER; note = deoxy-thymine phosphorothioate
  misc_feature 1..19: note = RNA
  misc_feature 20..21: note = DNA
gccgtgcggttcagcaacatt

SEQ ID NO: 1523 - DNA, 21 bp, synthetic construct
  misc_feature 1..21: note = Description of Artificial Sequence: Synthetic oligonucleotide
  source 1..21: mol_type = other DNA
  modified_base 1: mod_base = OTHER; note = 2'-fluoro nucleotide
  modified_base 2: mod_base = OTHER; note = 2'-fluoro nucleotide
  modified_base 3: mod_base = OTHER; note = 2'-O-Methyl nucleotide
  modified_base 4: mod_base = OTHER; note = 2'-fluoro nucleotide
  modified_base 5: mod_base = OTHER; note = 2'-O-Methyl nucleotide
  modified_base 6: mod_base = OTHER; note = 2'-fluoro nucleotide
  modified_base 7: mod_base = OTHER; note = 2'-O-Methyl nucleotide
  modified_base 8: mod_base = OTHER; note = 2'-fluoro nucleotide
  modified_base 9: mod_base = OTHER; note = 2'-O-Methyl nucleotide
  modified_base 10: mod_base = OTHER; note = 2'-fluoro nucleotide
  modified_base 11: mod_base = OTHER; note = 2'-O-Methyl nucleotide
  modified_base 12: mod_base = OTHER; note = 2'-fluoro nucleotide
  modified_base 13: mod_base = OTHER; note = 2'-O-Methyl nucleotide
  modified_base 14: mod_base = OTHER; note = 2'-fluoro nucleotide
  modified_base 15: mod_base = OTHER; note = 2'-O-Methyl nucleotide
  modified_base 16: mod_base = OTHER; note = 2'-fluoro nucleotide
  modified_base 17: mod_base = OTHER; note = 2'-O-Methyl nucleotide
  modified_base 18: mod_base = OTHER; note = 2'-fluoro nucleotide
  modified_base 19: mod_base = OTHER; note = 2'-O-Methyl nucleotide
  modified_base 20: mod_base = OTHER; note = deoxy-thymine phosphorothioate
  misc_feature 1..19: note = RNA
  misc_feature 20..21: note = DNA
tgttgctgaaccgcacggctt

SEQ ID NO: 1524 - DNA, 21 bp, synthetic construct
  misc_feature 1..21: note = Description of Artificial Sequence: Synthetic oligonucleotide
  source 1..21: mol_type = other DNA
  modified_base 1: mod_base = OTHER; note = 2'-O-Methyl nucleotide
  modified_base 2: mod_base = OTHER; note = 2'-O-Methyl nucleotide
  modified_base 3: mod_base = OTHER; note = 2'-fluoro nucleotide
  modified_base 4: mod_base = OTHER; note = 2'-O-Methyl nucleotide
  modified_base 5: mod_base = OTHER; note = 2'-fluoro nucleotide
  modified_base 6: mod_base = OTHER; note = 2'-O-Methyl nucleotide
  modified_base 7: mod_base = OTHER; note = 2'-fluoro nucleotide
  modified_base 8: mod_base = OTHER; note = 2'-O-Methyl nucleotide
  modified_base 9: mod_base = OTHER; note = 2'-fluoro nucleotide
  modified_base 10: mod_base = OTHER; note = 2'-O-Methyl nucleotide
  modified_base 11: mod_base = OTHER; note = 2'-fluoro nucleotide
  modified_base 12: mod_base = OTHER; note = 2'-O-Methyl nucleotide
  modified_base 13: mod_base = OTHER; note = 2'-fluoro nucleotide
  modified_base 14: mod_base = OTHER; note = 2'-O-Methyl nucleotide
  modified_base 15: mod_base = OTHER; note = 2'-fluoro nucleotide
  modified_base 16: mod_base = OTHER; note = 2'-O-Methyl nucleotide
  modified_base 17: mod_base = OTHER; note = 2'-fluoro nucleotide
  modified_base 18: mod_base = OTHER; note = 2'-O-Methyl nucleotide
  modified_base 19: mod_base = OTHER; note = 2'-fluoro nucleotide
  modified_base 20: mod_base = OTHER; note = deoxy-thymine phosphorothioate
  misc_feature 1..19: note = RNA
  misc_feature 20..21: note = DNA
ccgtgcggttcagcaacaatt

SEQ ID NO: 1525 - DNA, 21 bp, synthetic construct
  misc_feature 1..21: note = Description of Artificial Sequence: Synthetic oligonucleotide
  source 1..21: mol_type = other DNA
  modified_base 1: mod_base = OTHER; note = 2'-fluoro nucleotide
  modified_base 2: mod_base = OTHER; note = 2'-fluoro nucleotide
  modified_base 3: mod_base = OTHER; note = 2'-O-Methyl nucleotide
  modified_base 4: mod_base = OTHER; note = 2'-fluoro nucleotide
  modified_base 5: mod_base = OTHER; note = 2'-O-Methyl nucleotide
  modified_base 6: mod_base = OTHER; note = 2'-fluoro nucleotide
  modified_base 7: mod_base = OTHER; note = 2'-O-Methyl nucleotide
  modified_base 8: mod_base = OTHER; note = 2'-fluoro nucleotide
  modified_base 9: mod_base = OTHER; note = 2'-O-Methyl nucleotide
  modified_base 10: mod_base = OTHER; note = 2'-fluoro nucleotide
  modified_base 11: mod_base = OTHER; note = 2'-O-Methyl nucleotide
  modified_base 12: mod_base = OTHER; note = 2'-fluoro nucleotide
  modified_base 13: mod_base = OTHER; note = 2'-O-Methyl nucleotide
  modified_base 14: mod_base = OTHER; note = 2'-fluoro nucleotide
  modified_base 15: mod_base = OTHER; note = 2'-O-Methyl nucleotide
  modified_base 16: mod_base = OTHER; note = 2'-fluoro nucleotide
  modified_base 17: mod_base = OTHER; note = 2'-O-Methyl nucleotide
  modified_base 18: mod_base = OTHER; note = 2'-fluoro nucleotide
  modified_base 19: mod_base = OTHER; note = 2'-O-Methyl nucleotide
  modified_base 20: mod_base = OTHER; note = deoxy-thymine phosphorothioate
  misc_feature 1..19: note = RNA
  misc_feature 20..21: note = DNA
ttgttgctgaaccgcacggtt

SEQ ID NO: 1526 - DNA, 21 bp, synthetic construct
  misc_feature 1..21: note = Description of Artificial Sequence: Synthetic oligonucleotide
  source 1..21: mol_type = other DNA
  modified_base 1: mod_base = OTHER; note = 2'-O-Methyl nucleotide
  modified_base 2: mod_base = OTHER; note = 2'-O-Methyl nucleotide
  modified_base 3: mod_base = OTHER; note = 2'-fluoro nucleotide
  modified_base 4: mod_base = OTHER; note = 2'-O-Methyl nucleotide
  modified_base 5: mod_base = OTHER; note = 2'-fluoro nucleotide
  modified_base 6: mod_base = OTHER; note = 2'-O-Methyl nucleotide
  modified_base 7: mod_base = OTHER; note = 2'-fluoro nucleotide
  modified_base 8: mod_base = OTHER; note = 2'-O-Methyl nucleotide
  modified_base 9: mod_base = OTHER; note = 2'-fluoro nucleotide
  modified_base 10: mod_base = OTHER; note = 2'-O-Methyl nucleotide
  modified_base 11: mod_base = OTHER; note = 2'-fluoro nucleotide
  modified_base 12: mod_base = OTHER; note = 2'-O-Methyl nucleotide
  modified_base 13: mod_base = OTHER; note = 2'-fluoro nucleotide
  modified_base 14: mod_base = OTHER; note = 2'-O-Methyl nucleotide
  modified_base 15: mod_base = OTHER; note = 2'-fluoro nucleotide
  modified_base 16: mod_base = OTHER; note = 2'-O-Methyl nucleotide
  modified_base 17: mod_base = OTHER; note = 2'-fluoro nucleotide
  modified_base 18: mod_base = OTHER; note = 2'-O-Methyl nucleotide
  modified_base 19: mod_base = OTHER; note = 2'-fluoro nucleotide
  modified_base 20: mod_base = OTHER; note = deoxy-thymine phosphorothioate
  misc_feature 1..19: note = RNA
  misc_feature 20..21: note = DNA
gtgcggttcagcaacaacctt

SEQ ID NO: 1527 - DNA, 21 bp, synthetic construct
  misc_feature 1..21: note = Description of Artificial Sequence: Synthetic oligonucleotide
  source 1..21: mol_type = other DNA
  modified_base 1: mod_base = OTHER; note = 2'-fluoro nucleotide
  modified_base 2: mod_base = OTHER; note = 2'-fluoro nucleotide
  modified_base 3: mod_base = OTHER; note = 2'-O-Methyl nucleotide
  modified_base 4: mod_base = OTHER; note = 2'-fluoro nucleotide
  modified_base 5: mod_base = OTHER; note = 2'-O-Methyl nucleotide
  modified_base 6: mod_base = OTHER; note = 2'-fluoro nucleotide
  modified_base 7: mod_base = OTHER; note = 2'-O-Methyl nucleotide
  modified_base 8: mod_base = OTHER; note = 2'-fluoro nucleotide
  modified_base 9: mod_base = OTHER; note = 2'-O-Methyl nucleotide
  modified_base 10: mod_base = OTHER; note = 2'-fluoro nucleotide
  modified_base 11: mod_base = OTHER; note = 2'-O-Methyl nucleotide
  modified_base 12: mod_base = OTHER; note = 2'-fluoro nucleotide
  modified_base 13: mod_base = OTHER; note = 2'-O-Methyl nucleotide
  modified_base 14: mod_base = OTHER; note = 2'-fluoro nucleotide
  modified_base 15: mod_base = OTHER; note = 2'-O-Methyl nucleotide
  modified_base 16: mod_base = OTHER; note = 2'-fluoro nucleotide
  modified_base 17: mod_base = OTHER; note = 2'-O-Methyl nucleotide
  modified_base 18: mod_base = OTHER; note = 2'-fluoro nucleotide
  modified_base 19: mod_base = OTHER; note = 2'-O-Methyl nucleotide
  modified_base 20: mod_base = OTHER; note = deoxy-thymine phosphorothioate
  misc_feature 1..19: note = RNA
  misc_feature 20..21: note = DNA
ggttgttgctgaaccgcactt

SEQ ID NO: 1528 - DNA, 21 bp, synthetic construct
  misc_feature 1..21: note = Description of Artificial Sequence: Synthetic oligonucleotide
  source 1..21: mol_type = other DNA
  modified_base 1: mod_base = OTHER; note = 2'-O-Methyl nucleotide
  modified_base 2: mod_base = OTHER; note = 2'-O-Methyl nucleotide
  modified_base 3: mod_base = OTHER; note = 2'-fluoro nucleotide
  modified_base 4: mod_base = OTHER; note = 2'-O-Methyl nucleotide
  modified_base 5: mod_base = OTHER; note = 2'-fluoro nucleotide
  modified_base 6: mod_base = OTHER; note = 2'-O-Methyl nucleotide
  modified_base 7: mod_base = OTHER; note = 2'-fluoro nucleotide
  modified_base 8: mod_base = OTHER; note = 2'-O-Methyl nucleotide
  modified_base 9: mod_base = OTHER; note = 2'-fluoro nucleotide
  modified_base 10: mod_base = OTHER; note = 2'-O-Methyl nucleotide
  modified_base 11: mod_base = OTHER; note = 2'-fluoro nucleotide
  modified_base 12: mod_base = OTHER; note = 2'-O-Methyl nucleotide
  modified_base 13: mod_base = OTHER; note = 2'-fluoro nucleotide
  modified_base 14: mod_base = OTHER; note = 2'-O-Methyl nucleotide
  modified_base 15: mod_base = OTHER; note = 2'-fluoro nucleotide
  modified_base 16: mod_base = OTHER; note = 2'-O-Methyl nucleotide
  modified_base 17: mod_base = OTHER; note = 2'-fluoro nucleotide
  modified_base 18: mod_base = OTHER; note = 2'-O-Methyl nucleotide
  modified_base 19: mod_base = OTHER; note = 2'-fluoro nucleotide
  modified_base 20: mod_base = OTHER; note = deoxy-thymine phosphorothioate
  misc_feature 1..19: note = RNA
  misc_feature 20..21: note = DNA
gcggttcagcaacaacccttt

SEQ ID NO: 1529 - DNA, 21 bp, synthetic construct
  misc_feature 1..21: note = Description of Artificial Sequence: Synthetic oligonucleotide
  source 1..21: mol_type = other DNA
  modified_base 1: mod_base = OTHER; note = 2'-fluoro nucleotide
  modified_base 2: mod_base = OTHER; note = 2'-fluoro nucleotide
  modified_base 3: mod_base = OTHER; note = 2'-O-Methyl nucleotide
  modified_base 4: mod_base = OTHER; note = 2'-fluoro nucleotide
  modified_base 5: mod_base = OTHER; note = 2'-O-Methyl nucleotide
  modified_base 6: mod_base = OTHER; note = 2'-fluoro nucleotide
  modified_base 7: mod_base = OTHER; note = 2'-O-Methyl nucleotide
  modified_base 8: mod_base = OTHER; note = 2'-fluoro nucleotide
  modified_base 9: mod_base = OTHER; note = 2'-O-Methyl nucleotide
  modified_base 10: mod_base = OTHER; note = 2'-fluoro nucleotide
  modified_base 11: mod_base = OTHER; note = 2'-O-Methyl nucleotide
  modified_base 12: mod_base = OTHER; note = 2'-fluoro nucleotide
  modified_base 13: mod_base = OTHER; note = 2'-O-Methyl nucleotide
  modified_base 14: mod_base = OTHER; note = 2'-fluoro nucleotide
  modified_base 15: mod_base = OTHER; note = 2'-O-Methyl nucleotide
  modified_base 16: mod_base = OTHER; note = 2'-fluoro nucleotide
  modified_base 17: mod_base = OTHER; note = 2'-O-Methyl nucleotide
  modified_base 18: mod_base = OTHER; note = 2'-fluoro nucleotide
  modified_base 19: mod_base = OTHER; note = 2'-O-Methyl nucleotide
  modified_base 20: mod_base = OTHER; note = deoxy-thymine phosphorothioate
  misc_feature 1..19: note = RNA
  misc_feature 20..21: note = DNA
agggttgttgctgaaccgctt

SEQ ID NO: 1530 - DNA, 21 bp, synthetic construct
  misc_feature 1..21: note = Description of Artificial Sequence: Synthetic oligonucleotide
  source 1..21: mol_type = other DNA
  modified_base 1: mod_base = OTHER; note = 2'-O-Methyl nucleotide
  modified_base 2: mod_base = OTHER; note = 2'-O-Methyl nucleotide
  modified_base 3: mod_base = OTHER; note = 2'-fluoro nucleotide
  modified_base 4: mod_base = OTHER; note = 2'-O-Methyl nucleotide
  modified_base 5: mod_base = OTHER; note = 2'-fluoro nucleotide
  modified_base 6: mod_base = OTHER; note = 2'-O-Methyl nucleotide
  modified_base 7: mod_base = OTHER; note = 2'-fluoro nucleotide
  modified_base 8: mod_base = OTHER; note = 2'-O-Methyl nucleotide
  modified_base 9: mod_base = OTHER; note = 2'-fluoro nucleotide
  modified_base 10: mod_base = OTHER; note = 2'-O-Methyl nucleotide
  modified_base 11: mod_base = OTHER; note = 2'-fluoro nucleotide
  modified_base 12: mod_base = OTHER; note = 2'-O-Methyl nucleotide
  modified_base 13: mod_base = OTHER; note = 2'-fluoro nucleotide
  modified_base 14: mod_base = OTHER; note = 2'-O-Methyl nucleotide
  modified_base 15: mod_base = OTHER; note = 2'-fluoro nucleotide
  modified_base 16: mod_base = OTHER; note = 2'-O-Methyl nucleotide
  modified_base 17: mod_base = OTHER; note = 2'-fluoro nucleotide
  modified_base 18: mod_base = OTHER; note = 2'-O-Methyl nucleotide
  modified_base 19: mod_base = OTHER; note = 2'-fluoro nucleotide
  modified_base 20: mod_base = OTHER; note = deoxy-thymine phosphorothioate
  misc_feature 1..19: note = RNA
  misc_feature 20..21: note = DNA
ggttcagcaacaaccctgctt

SEQ ID NO: 1531 - DNA, 21 bp, synthetic construct
  misc_feature 1..21: note = Description of Artificial Sequence: Synthetic oligonucleotide
  source 1..21: mol_type = other DNA
  modified_base 1: mod_base = OTHER; note = 2'-fluoro nucleotide
  modified_base 2: mod_base = OTHER; note = 2'-fluoro nucleotide
  modified_base 3: mod_base = OTHER; note = 2'-O-Methyl nucleotide
  modified_base 4: mod_base = OTHER; note = 2'-fluoro nucleotide
  modified_base 5: mod_base = OTHER; note = 2'-O-Methyl nucleotide
  modified_base 6: mod_base = OTHER; note = 2'-fluoro nucleotide
  modified_base 7: mod_base = OTHER; note = 2'-O-Methyl nucleotide
  modified_base 8: mod_base = OTHER; note = 2'-fluoro nucleotide
  modified_base 9: mod_base = OTHER; note = 2'-O-Methyl nucleotide
  modified_base 10: mod_base = OTHER; note = 2'-fluoro nucleotide
  modified_base 11: mod_base = OTHER; note = 2'-O-Methyl nucleotide
  modified_base 12: mod_base = OTHER; note = 2'-fluoro nucleotide
  modified_base 13: mod_base = OTHER; note = 2'-O-Methyl nucleotide
  modified_base 14: mod_base = OTHER; note = 2'-fluoro nucleotide
  modified_base 15: mod_base = OTHER; note = 2'-O-Methyl nucleotide
  modified_base 16: mod_base = OTHER; note = 2'-fluoro nucleotide
  modified_base 17: mod_base = OTHER; note = 2'-O-Methyl nucleotide
  modified_base 18: mod_base = OTHER; note = 2'-fluoro nucleotide
  modified_base 19: mod_base = OTHER; note = 2'-O-Methyl nucleotide
  modified_base 20: mod_base = OTHER; note = deoxy-thymine phosphorothioate
  misc_feature 1..19: note = RNA
  misc_feature 20..21: note = DNA
gcagggttgttgctgaacctt

SEQ ID NO: 1532 - DNA, 21 bp, synthetic construct
  misc_feature 1..21: note = Description of Artificial Sequence: Synthetic oligonucleotide
  source 1..21: mol_type = other DNA
  modified_base 1: mod_base = OTHER; note = 2'-O-Methyl nucleotide
  modified_base 2: mod_base = OTHER; note = 2'-O-Methyl nucleotide
  modified_base 3: mod_base = OTHER; note = 2'-fluoro nucleotide
  modified_base 4: mod_base = OTHER; note = 2'-O-Methyl nucleotide
  modified_base 5: mod_base = OTHER; note = 2'-fluoro nucleotide
  modified_base 6: mod_base = OTHER; note = 2'-O-Methyl nucleotide
  modified_base 7: mod_base = OTHER; note = 2'-fluoro nucleotide
  modified_base 8: mod_base = OTHER; note = 2'-O-Methyl nucleotide
  modified_base 9: mod_base = OTHER; note = 2'-fluoro nucleotide
  modified_base 10: mod_base = OTHER; note = 2'-O-Methyl nucleotide
  modified_base 11: mod_base = OTHER; note = 2'-fluoro nucleotide
  modified_base 12: mod_base = OTHER; note = 2'-O-Methyl nucleotide
  modified_base 13: mod_base = OTHER; note = 2'-fluoro nucleotide
  modified_base 14: mod_base = OTHER; note = 2'-O-Methyl nucleotide
  modified_base 15: mod_base = OTHER; note = 2'-fluoro nucleotide
  modified_base 16: mod_base = OTHER; note = 2'-O-Methyl nucleotide
  modified_base 17: mod_base = OTHER; note = 2'-fluoro nucleotide
  modified_base 18: mod_base = OTHER; note = 2'-O-Methyl nucleotide
  modified_base 19: mod_base = OTHER; note = 2'-fluoro nucleotide
  modified_base 20: mod_base = OTHER; note = deoxy-thymine phosphorothioate
  misc_feature 1..19: note = RNA
  misc_feature 20..21: note = DNA
gcaacaaccctgccctgtgtt

SEQ ID NO: 1533 - DNA, 21 bp, synthetic construct
  misc_feature 1..21: note = Description of Artificial Sequence: Synthetic oligonucleotide
  source 1..21: mol_type = other DNA
  modified_base 1: mod_base = OTHER; note = 2'-fluoro nucleotide
  modified_base 2: mod_base = OTHER; note = 2'-fluoro nucleotide
  modified_base 3: mod_base = OTHER; note = 2'-O-Methyl nucleotide
  modified_base 4: mod_base = OTHER; note = 2'-fluoro nucleotide
  modified_base 5: mod_base = OTHER; note = 2'-O-Methyl nucleotide
  modified_base 6: mod_base = OTHER; note = 2'-fluoro nucleotide
  modified_base 7: mod_base = OTHER; note = 2'-O-Methyl nucleotide
  modified_base 8: mod_base = OTHER; note = 2'-fluoro nucleotide
  modified_base 9: mod_base = OTHER; note = 2'-O-Methyl nucleotide
  modified_base 10: mod_base = OTHER; note = 2'-fluoro nucleotide
  modified_base 11: mod_base = OTHER; note = 2'-O-Methyl nucleotide
  modified_base 12: mod_base = OTHER; note = 2'-fluoro nucleotide
  modified_base 13: mod_base = OTHER; note = 2'-O-Methyl nucleotide
  modified_base 14: mod_base = OTHER; note = 2'-fluoro nucleotide
  modified_base 15: mod_base = OTHER; note = 2'-O-Methyl nucleotide
  modified_base 16: mod_base = OTHER; note = 2'-fluoro nucleotide
  modified_base 17: mod_base = OTHER; note = 2'-O-Methyl nucleotide
  modified_base 18: mod_base = OTHER; note = 2'-fluoro nucleotide
  modified_base 19: mod_base = OTHER; note = 2'-O-Methyl nucleotide
  modified_base 20: mod_base = OTHER; note = deoxy-thymine phosphorothioate
  misc_feature 1..19: note = RNA
  misc_feature 20..21: note = DNA
cacagggcagggttgttgctt

SEQ ID NO: 1534 - DNA, 21 bp, synthetic construct
  misc_feature 1..21: note = Description of Artificial Sequence: Synthetic oligonucleotide
  source 1..21: mol_type = other DNA
  modified_base 1: mod_base = OTHER; note = 2'-O-Methyl nucleotide
  modified_base 2: mod_base = OTHER; note = 2'-O-Methyl nucleotide
  modified_base 3: mod_base = OTHER; note = 2'-fluoro nucleotide
  modified_base 4: mod_base = OTHER; note = 2'-O-Methyl nucleotide
  modified_base 5: mod_base = OTHER; note = 2'-fluoro nucleotide
  modified_base 6: mod_base = OTHER; note = 2'-O-Methyl nucleotide
  modified_base 7: mod_base = OTHER; note = 2'-fluoro nucleotide
  modified_base 8: mod_base = OTHER; note = 2'-O-Methyl nucleotide
  modified_base 9: mod_base = OTHER; note = 2'-fluoro nucleotide
  modified_base 10: mod_base = OTHER; note = 2'-O-Methyl nucleotide
  modified_base 11: mod_base = OTHER; note = 2'-fluoro nucleotide
  modified_base 12: mod_base = OTHER; note = 2'-O-Methyl nucleotide
  modified_base 13: mod_base = OTHER; note = 2'-fluoro nucleotide
  modified_base 14: mod_base = OTHER; note = 2'-O-Methyl nucleotide
  modified_base 15: mod_base = OTHER; note = 2'-fluoro nucleotide
  modified_base 16: mod_base = OTHER; note = 2'-O-Methyl nucleotide
  modified_base 17: mod_base = OTHER; note = 2'-fluoro nucleotide
  modified_base 18: mod_base = OTHER; note = 2'-O-Methyl nucleotide
  modified_base 19: mod_base = OTHER; note = 2'-fluoro nucleotide
  modified_base 20: mod_base = OTHER; note = deoxy-thymine phosphorothioate
  misc_feature 1..19: note = RNA
  misc_feature 20..21: note = DNA
aacaaccctgccctgtgcatt

SEQ ID NO: 1535 - DNA, 21 bp, synthetic construct
  misc_feature 1..21: note = Description of Artificial Sequence: Synthetic oligonucleotide
  source 1..21: mol_type = other DNA
  modified_base 1: mod_base = OTHER; note = 2'-fluoro nucleotide
  modified_base 2: mod_base = OTHER; note = 2'-fluoro nucleotide
  modified_base 3: mod_base = OTHER; note = 2'-O-Methyl nucleotide
  modified_base 4: mod_base = OTHER; note = 2'-fluoro nucleotide
  modified_base 5: mod_base = OTHER; note = 2'-O-Methyl nucleotide
  modified_base 6: mod_base = OTHER; note = 2'-fluoro nucleotide
  modified_base 7: mod_base = OTHER; note = 2'-O-Methyl nucleotide
  modified_base 8: mod_base = OTHER; note = 2'-fluoro nucleotide
  modified_base 9: mod_base = OTHER; note = 2'-O-Methyl nucleotide
  modified_base 10: mod_base = OTHER; note = 2'-fluoro nucleotide
  modified_base 11: mod_base = OTHER; note = 2'-O-Methyl nucleotide
  modified_base 12: mod_base = OTHER; note = 2'-fluoro nucleotide
  modified_base 13: mod_base = OTHER; note = 2'-O-Methyl nucleotide
  modified_base 14: mod_base = OTHER; note = 2'-fluoro nucleotide
  modified_base 15: mod_base = OTHER; note = 2'-O-Methyl nucleotide
  modified_base 16: mod_base = OTHER; note = 2'-fluoro nucleotide
  modified_base 17: mod_base = OTHER; note = 2'-O-Methyl nucleotide
  modified_base 18: mod_base = OTHER; note = 2'-fluoro nucleotide
  modified_base 19: mod_base = OTHER; note = 2'-O-Methyl nucleotide
  modified_base 20: mod_base = OTHER; note = deoxy-thymine phosphorothioate
  misc_feature 1..19: note = RNA
  misc_feature 20..21: note = DNA
tgcacagggcagggttgtttt

SEQ ID NO: 1536 - DNA, 21 bp, synthetic construct
  misc_feature 1..21: note = Description of Artificial Sequence: Synthetic oligonucleotide
  source 1..21: mol_type = other DNA
  modified_base 1: mod_base = OTHER; note = 2'-O-Methyl nucleotide
  modified_base 2: mod_base = OTHER; note = 2'-O-Methyl nucleotide
  modified_base 3: mod_base = OTHER; note = 2'-fluoro nucleotide
  modified_base 4: mod_base = OTHER; note = 2'-O-Methyl nucleotide
  modified_base 5: mod_base = OTHER; note = 2'-fluoro nucleotide
  modified_base 6: mod_base = OTHER; note = 2'-O-Methyl nucleotide
  modified_base 7: mod_base = OTHER; note = 2'-fluoro nucleotide
  modified_base 8: mod_base = OTHER; note = 2'-O-Methyl nucleotide
  modified_base 9: mod_base = OTHER; note = 2'-fluoro nucleotide
  modified_base 10: mod_base = OTHER; note = 2'-O-Methyl nucleotide
  modified_base 11: mod_base = OTHER; note = 2'-fluoro nucleotide
  modified_base 12: mod_base = OTHER; note = 2'-O-Methyl nucleotide
  modified_base 13: mod_base = OTHER; note = 2'-fluoro nucleotide
  modified_base 14: mod_base = OTHER; note = 2'-O-Methyl nucleotide
  modified_base 15: mod_base = OTHER; note = 2'-fluoro nucleotide
  modified_base 16: mod_base = OTHER; note = 2'-O-Methyl nucleotide
  modified_base 17: mod_base = OTHER; note = 2'-fluoro nucleotide
  modified_base 18: mod_base = OTHER; note = 2'-O-Methyl nucleotide
  modified_base 19: mod_base = OTHER; note = 2'-fluoro nucleotide
  modified_base 20: mod_base = OTHER; note = deoxy-thymine phosphorothioate
  misc_feature 1..19: note = RNA
  misc_feature 20..21: note = DNA
acgtggagagcatccagtgtt

SEQ ID NO: 1537 - DNA, 21 bp, synthetic construct
  misc_feature 1..21: note = Description of Artificial Sequence: Synthetic oligonucleotide
  source 1..21: mol_type = other DNA
  modified_base 1: mod_base = OTHER; note = 2'-fluoro nucleotide
  modified_base 2: mod_base = OTHER; note = 2'-fluoro nucleotide
  modified_base 3: mod_base = OTHER; note = 2'-O-Methyl nucleotide
  modified_base 4: mod_base = OTHER; note = 2'-fluoro nucleotide
  modified_base 5: mod_base = OTHER; note = 2'-O-Methyl nucleotide
  modified_base 6: mod_base = OTHER; note = 2'-fluoro nucleotide
  modified_base 7: mod_base = OTHER; note = 2'-O-Methyl nucleotide
  modified_base 8: mod_base = OTHER; note = 2'-fluoro nucleotide
  modified_base 9: mod_base = OTHER; note = 2'-O-Methyl nucleotide
  modified_base 10: mod_base = OTHER; note = 2'-fluoro nucleotide
  modified_base 11: mod_base = OTHER; note = 2'-O-Methyl nucleotide
  modified_base 12: mod_base = OTHER; note = 2'-fluoro nucleotide
  modified_base 13: mod_base = OTHER; note = 2'-O-Methyl nucleotide
  modified_base 14: mod_base = OTHER; note = 2'-fluoro nucleotide
  modified_base 15: mod_base = OTHER; note = 2'-O-Methyl nucleotide
  modified_base 16: mod_base = OTHER; note = 2'-fluoro nucleotide
  modified_base 17: mod_base = OTHER; note = 2'-O-Methyl nucleotide
  modified_base 18: mod_base = OTHER; note = 2'-fluoro nucleotide
  modified_base 19: mod_base = OTHER; note = 2'-O-Methyl nucleotide
  modified_base 20: mod_base = OTHER; note = deoxy-thymine phosphorothioate
  misc_feature 1..19: note = RNA
  misc_feature 20..21: note = DNA
cactggatgctctccacgttt

SEQ ID NO: 1538 - DNA, 21 bp, synthetic construct
  misc_feature 1..21: note = Description of Artificial Sequence: Synthetic oligonucleotide
  source 1..21: mol_type = other DNA
  modified_base 1: mod_base = OTHER; note = 2'-O-Methyl nucleotide
  modified_base 2: mod_base = OTHER; note = 2'-O-Methyl nucleotide
  modified_base 3: mod_base = OTHER; note = 2'-fluoro nucleotide
  modified_base 4: mod_base = OTHER; note = 2'-O-Methyl nucleotide
  modified_base 5: mod_base = OTHER; note = 2'-fluoro nucleotide
  modified_base 6: mod_base = OTHER; note = 2'-O-Methyl nucleotide
  modified_base 7: mod_base = OTHER; note = 2'-fluoro nucleotide
  modified_base 8: mod_base = OTHER; note = 2'-O-Methyl nucleotide
  modified_base 9: mod_base = OTHER; note = 2'-fluoro nucleotide
  modified_base 10: mod_base = OTHER; note = 2'-O-Methyl nucleotide
  modified_base 11: mod_base = OTHER; note = 2'-fluoro nucleotide
  modified_base 12: mod_base = OTHER; note = 2'-O-Methyl nucleotide
  modified_base 13: mod_base = OTHER; note = 2'-fluoro nucleotide
  modified_base 14: mod_base = OTHER; note = 2'-O-Methyl nucleotide
  modified_base 15: mod_base = OTHER; note = 2'-fluoro nucleotide
  modified_base 16: mod_base = OTHER; note = 2'-O-Methyl nucleotide
  modified_base 17: mod_base = OTHER; note = 2'-fluoro nucleotide
  modified_base 18: mod_base = OTHER; note = 2'-O-Methyl nucleotide
  modified_base 19: mod_base = OTHER; note = 2'-fluoro nucleotide
  modified_base 20: mod_base = OTHER; note = deoxy-thymine phosphorothioate
  misc_feature 1..19: note = RNA
  misc_feature 20..21: note = DNA
cgtggagagcatccagtggtt

SEQ ID NO: 1539 - DNA, 21 bp, synthetic construct
  misc_feature 1..21: note = Description of Artificial Sequence: Synthetic oligonucleotide
  source 1..21: mol_type = other DNA
  modified_base 1: mod_base = OTHER; note = 2'-fluoro nucleotide
  modified_base 2: mod_base = OTHER; note = 2'-fluoro nucleotide
  modified_base 3: mod_base = OTHER; note = 2'-O-Methyl nucleotide
  modified_base 4: mod_base = OTHER; note = 2'-fluoro nucleotide
  modified_base 5: mod_base = OTHER; note = 2'-O-Methyl nucleotide
  modified_base 6: mod_base = OTHER; note = 2'-fluoro nucleotide
  modified_base 7: mod_base = OTHER; note = 2'-O-Methyl nucleotide
  modified_base 8: mod_base = OTHER; note = 2'-fluoro nucleotide
  modified_base 9: mod_base = OTHER; note = 2'-O-Methyl nucleotide
  modified_base 10: mod_base = OTHER; note = 2'-fluoro nucleotide
  modified_base 11: mod_base = OTHER; note = 2'-O-Methyl nucleotide
  modified_base 12: mod_base = OTHER; note = 2'-fluoro nucleotide
  modified_base 13: mod_base = OTHER; note = 2'-O-Methyl nucleotide
  modified_base 14: mod_base = OTHER; note = 2'-fluoro nucleotide
  modified_base 15: mod_base = OTHER; note = 2'-O-Methyl nucleotide
  modified_base 16: mod_base = OTHER; note = 2'-fluoro nucleotide
  modified_base 17: mod_base = OTHER; note = 2'-O-Methyl nucleotide
  modified_base 18: mod_base = OTHER; note = 2'-fluoro nucleotide
  modified_base 19: mod_base = OTHER; note = 2'-O-Methyl nucleotide
  modified_base 20: mod_base = OTHER; note = deoxy-thymine phosphorothioate
  misc_feature 1..19: note = RNA
  misc_feature 20..21: note = DNA
ccactggatgctctccacgtt

SEQ ID NO: 1540 - DNA, 21 bp, synthetic construct
  misc_feature 1..21: note = Description of Artificial Sequence: Synthetic oligonucleotide
  source 1..21: mol_type = other DNA
  modified_base 1: mod_base = OTHER; note = 2'-O-Methyl nucleotide
  modified_base 2: mod_base = OTHER; note = 2'-O-Methyl nucleotide
  modified_base 3: mod_base = OTHER; note = 2'-fluoro nucleotide
  modified_base 4: mod_base = OTHER; note = 2'-O-Methyl nucleotide
  modified_base 5: mod_base = OTHER; note = 2'-fluoro nucleotide
  modified_base 6: mod_base = OTHER; note = 2'-O-Methyl nucleotide
  modified_base 7: mod_base = OTHER; note = 2'-fluoro nucleotide
  modified_base 8: mod_base = OTHER; note = 2'-O-Methyl nucleotide
  modified_base 9: mod_base = OTHER; note = 2'-fluoro nucleotide
  modified_base 10: mod_base = OTHER; note = 2'-O-Methyl nucleotide
  modified_base 11: mod_base = OTHER; note = 2'-fluoro nucleotide
  modified_base 12: mod_base = OTHER; note = 2'-O-Methyl nucleotide
  modified_base 13: mod_base = OTHER; note = 2'-fluoro nucleotide
  modified_base 14: mod_base = OTHER; note = 2'-O-Methyl nucleotide
  modified_base 15: mod_base = OTHER; note = 2'-fluoro nucleotide
  modified_base 16: mod_base = OTHER; note = 2'-O-Methyl nucleotide
  modified_base 17: mod_base = OTHER; note = 2'-fluoro nucleotide
  modified_base 18: mod_base = OTHER; note = 2'-O-Methyl nucleotide
  modified_base 19: mod_base = OTHER; note = 2'-fluoro nucleotide
  modified_base 20: mod_base = OTHER; note = deoxy-thymine phosphorothioate
  misc_feature 1..19: note = RNA
  misc_feature 20..21: note = DNA
gtggagagcatccagtggctt

SEQ ID NO: 1541 - DNA, 21 bp, synthetic construct
  misc_feature 1..21: note = Description of Artificial Sequence: Synthetic oligonucleotide
  source 1..21: mol_type = other DNA
  modified_base 1: mod_base = OTHER; note = 2'-fluoro nucleotide
  modified_base 2: mod_base = OTHER; note = 2'-fluoro nucleotide
  modified_base 3: mod_base = OTHER; note = 2'-O-Methyl nucleotide
  modified_base 4: mod_base = OTHER; note = 2'-fluoro nucleotide
  modified_base 5: mod_base = OTHER; note = 2'-O-Methyl nucleotide
  modified_base 6: mod_base = OTHER; note = 2'-fluoro nucleotide
  modified_base 7: mod_base = OTHER; note = 2'-O-Methyl nucleotide
  modified_base 8: mod_base = OTHER; note = 2'-fluoro nucleotide
  modified_base 9: mod_base = OTHER; note = 2'-O-Methyl nucleotide
  modified_base 10: mod_base = OTHER; note = 2'-fluoro nucleotide
  modified_base 11: mod_base = OTHER; note = 2'-O-Methyl nucleotide
  modified_base 12: mod_base = OTHER; note = 2'-fluoro nucleotide
  modified_base 13: mod_base = OTHER; note = 2'-O-Methyl nucleotide
  modified_base 14: mod_base = OTHER; note = 2'-fluoro nucleotide
  modified_base 15: mod_base = OTHER; note = 2'-O-Methyl nucleotide
  modified_base 16: mod_base = OTHER; note = 2'-fluoro nucleotide
  modified_base 17: mod_base = OTHER; note = 2'-O-Methyl nucleotide
  modified_base 18: mod_base = OTHER; note = 2'-fluoro nucleotide
  modified_base 19: mod_base = OTHER; note = 2'-O-Methyl nucleotide
  modified_base 20: mod_base = OTHER; note = deoxy-thymine phosphorothioate
  misc_feature 1..19: note = RNA
  misc_feature 20..21: note = DNA
gccactggatgctctccactt

SEQ ID NO: 1542 - DNA, 21 bp, synthetic construct
  misc_feature 1..21: note = Description of Artificial Sequence: Synthetic oligonucleotide
  source 1..21: mol_type = other DNA
  modified_base 1: mod_base = OTHER; note = 2'-O-Methyl nucleotide
  modified_base 2: mod_base = OTHER; note = 2'-O-Methyl nucleotide
  modified_base 3: mod_base = OTHER; note = 2'-fluoro nucleotide
  modified_base 4: mod_base = OTHER; note = 2'-O-Methyl nucleotide
  modified_base 5: mod_base = OTHER; note = 2'-fluoro nucleotide
  modified_base 6: mod_base = OTHER; note = 2'-O-Methyl nucleotide
  modified_base 7: mod_base = OTHER; note = 2'-fluoro nucleotide
  modified_base 8: mod_base = OTHER; note = 2'-O-Methyl nucleotide
  modified_base 9: mod_base = OTHER; note = 2'-fluoro nucleotide
  modified_base 10: mod_base = OTHER; note = 2'-O-Methyl nucleotide
  modified_base 11: mod_base = OTHER; note = 2'-fluoro nucleotide
  modified_base 12: mod_base = OTHER; note = 2'-O-Methyl nucleotide
  modified_base 13: mod_base = OTHER; note = 2'-fluoro nucleotide
  modified_base 14: mod_base = OTHER; note = 2'-O-Methyl nucleotide
  modified_base 15: mod_base = OTHER; note = 2'-fluoro nucleotide
  modified_base 16: mod_base = OTHER; note = 2'-O-Methyl nucleotide
  modified_base 17: mod_base = OTHER; note = 2'-fluoro nucleotide
  modified_base 18: mod_base = OTHER; note = 2'-O-Methyl nucleotide
  modified_base 19: mod_base = OTHER; note = 2'-fluoro nucleotide
  modified_base 20: mod_base = OTHER; note = deoxy-thymine phosphorothioate
  misc_feature 1..19: note = RNA
  misc_feature 20..21: note = DNA
gagagcatccagtggcgggtt

SEQ ID NO: 1543 - DNA, 21 bp, synthetic construct
  misc_feature 1..21: note = Description of Artificial Sequence: Synthetic oligonucleotide
  source 1..21: mol_type = other DNA
  modified_base 1: mod_base = OTHER; note = 2'-fluoro nucleotide
  modified_base 2: mod_base = OTHER; note = 2'-fluoro nucleotide
  modified_base 3: mod_base = OTHER; note = 2'-O-Methyl nucleotide
  modified_base 4: mod_base = OTHER; note = 2'-fluoro nucleotide
  modified_base 5: mod_base = OTHER; note = 2'-O-Methyl nucleotide
  modified_base 6: mod_base = OTHER; note = 2'-fluoro nucleotide
  modified_base 7: mod_base = OTHER; note = 2'-O-Methyl nucleotide
  modified_base 8: mod_base = OTHER; note = 2'-fluoro nucleotide
  modified_base 9: mod_base = OTHER; note = 2'-O-Methyl nucleotide
  modified_base 10: mod_base = OTHER; note = 2'-fluoro nucleotide
  modified_base 11: mod_base = OTHER; note = 2'-O-Methyl nucleotide
  modified_base 12: mod_base = OTHER; note = 2'-fluoro nucleotide
  modified_base 13: mod_base = OTHER; note = 2'-O-Methyl nucleotide
  modified_base 14: mod_base = OTHER; note = 2'-fluoro nucleotide
  modified_base 15: mod_base = OTHER; note = 2'-O-Methyl nucleotide
  modified_base 16: mod_base = OTHER; note = 2'-fluoro nucleotide
  modified_base 17: mod_base = OTHER; note = 2'-O-Methyl nucleotide
  modified_base 18: mod_base = OTHER; note = 2'-fluoro nucleotide
  modified_base 19: mod_base = OTHER; note = 2'-O-Methyl nucleotide
  modified_base 20: mod_base = OTHER; note = deoxy-thymine phosphorothioate
  misc_feature 1..19: note = RNA
  misc_feature 20..21: note = DNA
cccgccactggatgctctctt

SEQ ID NO: 1544 - DNA, 21 bp, synthetic construct
  misc_feature 1..21: note = Description of Artificial Sequence: Synthetic oligonucleotide
  source 1..21: mol_type = other DNA
  modified_base 1: mod_base = OTHER; note = 2'-O-Methyl nucleotide
  modified_base 2: mod_base = OTHER; note = 2'-O-Methyl nucleotide
  modified_base 3: mod_base = OTHER; note = 2'-fluoro nucleotide
  modified_base 4: mod_base = OTHER; note = 2'-O-Methyl nucleotide
  modified_base 5: mod_base = OTHER; note = 2'-fluoro nucleotide
  modified_base 6: mod_base = OTHER; note = 2'-O-Methyl nucleotide
  modified_base 7: mod_base = OTHER; note = 2'-fluoro nucleotide
  modified_base 8: mod_base = OTHER; note = 2'-O-Methyl nucleotide
  modified_base 9: mod_base = OTHER; note = 2'-fluoro nucleotide
  modified_base 10: mod_base = OTHER; note = 2'-O-Methyl nucleotide
  modified_base 11: mod_base = OTHER; note = 2'-fluoro nucleotide
  modified_base 12: mod_base = OTHER; note = 2'-O-Methyl nucleotide
  modified_base 13: mod_base = OTHER; note = 2'-fluoro nucleotide
  modified_base 14: mod_base = OTHER; note = 2'-O-Methyl nucleotide
  modified_base 15: mod_base = OTHER; note = 2'-fluoro nucleotide
  modified_base 16: mod_base = OTHER; note = 2'-O-Methyl nucleotide
  modified_base 17: mod_base = OTHER; note = 2'-fluoro nucleotide
  modified_base 18: mod_base = OTHER; note = 2'-O-Methyl nucleotide
  modified_base 19: mod_base = OTHER; note = 2'-fluoro nucleotide
  modified_base 20: mod_base = OTHER; note = deoxy-thymine phosphorothioate
  misc_feature 1..19: note = RNA
  misc_feature 20..21: note = DNA
agagcatccagtggcgggatt

SEQ ID NO: 1545 - DNA, 21 bp, synthetic construct
  misc_feature 1..21: note = Description of Artificial Sequence: Synthetic oligonucleotide
  source 1..21: mol_type = other DNA
  modified_base 1: mod_base = OTHER; note = 2'-fluoro nucleotide
  modified_base 2: mod_base = OTHER; note = 2'-fluoro nucleotide
  modified_base 3: mod_base = OTHER; note = 2'-O-Methyl nucleotide
  modified_base 4: mod_base = OTHER; note = 2'-fluoro nucleotide
  modified_base 5: mod_base = OTHER; note = 2'-O-Methyl nucleotide
  modified_base 6: mod_base = OTHER; note = 2'-fluoro nucleotide
  modified_base 7: mod_base = OTHER; note = 2'-O-Methyl nucleotide
  modified_base 8: mod_base = OTHER; note = 2'-fluoro nucleotide
  modified_base 9: mod_base = OTHER; note = 2'-O-Methyl nucleotide
  modified_base 10: mod_base = OTHER; note = 2'-fluoro nucleotide
  modified_base 11: mod_base = OTHER; note = 2'-O-Methyl nucleotide
  modified_base 12: mod_base = OTHER; note = 2'-fluoro nucleotide
  modified_base 13: mod_base = OTHER; note = 2'-O-Methyl nucleotide
  modified_base 14: mod_base = OTHER; note = 2'-fluoro nucleotide
  modified_base 15: mod_base = OTHER; note = 2'-O-Methyl nucleotide
  modified_base 16: mod_base = OTHER; note = 2'-fluoro nucleotide
  modified_base 17: mod_base = OTHER; note = 2'-O-Methyl nucleotide
  modified_base 18: mod_base = OTHER; note = 2'-fluoro nucleotide
  modified_base 19: mod_base = OTHER; note = 2'-O-Methyl nucleotide
  modified_base 20: mod_base = OTHER; note = deoxy-thymine phosphorothioate
  misc_feature 1..19: note = RNA
  misc_feature 20..21: note = DNA
tcccgccactggatgctcttt

SEQ ID NO: 1546 - DNA, 21 bp, synthetic construct
  misc_feature 1..21: note = Description of Artificial Sequence: Synthetic oligonucleotide
  source 1..21: mol_type = other DNA
  modified_base 1: mod_base = OTHER; note = 2'-O-Methyl nucleotide
  modified_base 2: mod_base = OTHER; note = 2'-O-Methyl nucleotide
  modified_base 3: mod_base = OTHER; note = 2'-fluoro nucleotide
  modified_base 4: mod_base = OTHER; note = 2'-O-Methyl nucleotide
  modified_base 5: mod_base = OTHER; note = 2'-fluoro nucleotide
  modified_base 6: mod_base = OTHER; note = 2'-O-Methyl nucleotide
  modified_base 7: mod_base = OTHER; note = 2'-fluoro nucleotide
  modified_base 8: mod_base = OTHER; note = 2'-O-Methyl nucleotide
  modified_base 9: mod_base = OTHER; note = 2'-fluoro nucleotide
  modified_base 10: mod_base = OTHER; note = 2'-O-Methyl nucleotide
  modified_base 11: mod_base = OTHER; note = 2'-fluoro nucleotide
  modified_base 12: mod_base = OTHER; note = 2'-O-Methyl nucleotide
  modified_base 13: mod_base = OTHER; note = 2'-fluoro nucleotide
  modified_base 14: mod_base = OTHER; note = 2'-O-Methyl nucleotide
  modified_base 15: mod_base = OTHER; note = 2'-fluoro nucleotide
  modified_base 16: mod_base = OTHER; note = 2'-O-Methyl nucleotide
  modified_base 17: mod_base = OTHER; note = 2'-fluoro nucleotide
  modified_base 18: mod_base = OTHER; note = 2'-O-Methyl nucleotide
  modified_base 19: mod_base = OTHER; note = 2'-fluoro nucleotide
  modified_base 20: mod_base = OTHER; note = deoxy-thymine phosphorothioate
  misc_feature 1..19: note = RNA
  misc_feature 20..21: note = DNA
gagcatccagtggcgggactt

SEQ ID NO: 1547 - DNA, 21 bp, synthetic construct
  misc_feature 1..21: note = Description of Artificial Sequence: Synthetic oligonucleotide
  source 1..21: mol_type = other DNA
  modified_base 1: mod_base = OTHER; note = 2'-fluoro nucleotide
  modified_base 2: mod_base = OTHER; note = 2'-fluoro nucleotide
  modified_base 3: mod_base = OTHER; note = 2'-O-Methyl nucleotide
  modified_base 4: mod_base = OTHER; note = 2'-fluoro nucleotide
  modified_base 5: mod_base = OTHER; note = 2'-O-Methyl nucleotide
  modified_base 6: mod_base = OTHER; note = 2'-fluoro nucleotide
  modified_base 7: mod_base = OTHER; note = 2'-O-Methyl nucleotide
  modified_base 8: mod_base = OTHER; note = 2'-fluoro nucleotide
  modified_base 9: mod_base = OTHER; note = 2'-O-Methyl nucleotide
  modified_base 10: mod_base = OTHER; note = 2'-fluoro nucleotide
  modified_base 11: mod_base = OTHER; note = 2'-O-Methyl nucleotide
  modified_base 12: mod_base = OTHER; note = 2'-fluoro nucleotide
  modified_base 13: mod_base = OTHER; note = 2'-O-Methyl nucleotide
  modified_base 14: mod_base = OTHER; note = 2'-fluoro nucleotide
  modified_base 15: mod_base = OTHER; note = 2'-O-Methyl nucleotide
  modified_base 16: mod_base = OTHER; note = 2'-fluoro nucleotide
  modified_base 17: mod_base = OTHER; note = 2'-O-Methyl nucleotide
  modified_base 18: mod_base = OTHER; note = 2'-fluoro nucleotide
  modified_base 19: mod_base = OTHER; note = 2'-O-Methyl nucleotide
  modified_base 20: mod_base = OTHER; note = deoxy-thymine phosphorothioate
  misc_feature 1..19: note = RNA
  misc_feature 20..21: note = DNA
gtcccgccactggatgctctt

SEQ ID NO: 1548 - DNA, 21 bp, synthetic construct
  misc_feature 1..21: note = Description of Artificial Sequence: Synthetic oligonucleotide
  source 1..21: mol_type = other DNA
  modified_base 1: mod_base = OTHER; note = 2'-O-Methyl nucleotide
  modified_base 2: mod_base = OTHER; note = 2'-O-Methyl nucleotide
  modified_base 3: mod_base = OTHER; note = 2'-fluoro nucleotide
  modified_base 4: mod_base = OTHER; note = 2'-O-Methyl nucleotide
  modified_base 5: mod_base = OTHER; note = 2'-fluoro nucleotide
  modified_base 6: mod_base = OTHER; note = 2'-O-Methyl nucleotide
  modified_base 7: mod_base = OTHER; note = 2'-fluoro nucleotide
  modified_base 8: mod_base = OTHER; note = 2'-O-Methyl nucleotide
  modified_base 9: mod_base = OTHER; note = 2'-fluoro nucleotide
  modified_base 10: mod_base = OTHER; note = 2'-O-Methyl nucleotide
  modified_base 11: mod_base = OTHER; note = 2'-fluoro nucleotide
  modified_base 12: mod_base = OTHER; note = 2'-O-Methyl nucleotide
  modified_base 13: mod_base = OTHER; note = 2'-fluoro nucleotide
  modified_base 14: mod_base = OTHER; note = 2'-O-Methyl nucleotide
  modified_base 15: mod_base = OTHER; note = 2'-fluoro nucleotide
  modified_base 16: mod_base = OTHER; note = 2'-O-Methyl nucleotide
  modified_base 17: mod_base = OTHER; note = 2'-fluoro nucleotide
  modified_base 18: mod_base = OTHER; note = 2'-O-Methyl nucleotide
  modified_base 19: mod_base = OTHER; note = 2'-fluoro nucleotide
  modified_base 20: mod_base = OTHER; note = deoxy-thymine phosphorothioate
  misc_feature 1..19: note = RNA
  misc_feature 20..21: note = DNA
cagtggcgggacatagtcatt

SEQ ID NO: 1549 - DNA, 21 bp, synthetic construct
  misc_feature 1..21: note = Description of Artificial Sequence: Synthetic oligonucleotide
  source 1..21: mol_type = other DNA
  modified_base 1: mod_base = OTHER; note = 2'-fluoro nucleotide
  modified_base 2: mod_base = OTHER; note = 2'-fluoro nucleotide
  modified_base 3: mod_base = OTHER; note = 2'-O-Methyl nucleotide
  modified_base 4: mod_base = OTHER; note = 2'-fluoro nucleotide
  modified_base 5: mod_base = OTHER; note = 2'-O-Methyl nucleotide
  modified_base 6: mod_base = OTHER; note = 2'-fluoro nucleotide
  modified_base 7: mod_base = OTHER; note = 2'-O-Methyl nucleotide
  modified_base 8: mod_base = OTHER; note = 2'-fluoro nucleotide
  modified_base 9: mod_base = OTHER; note = 2'-O-Methyl nucleotide
  modified_base 10: mod_base = OTHER; note = 2'-fluoro nucleotide
  modified_base 11: mod_base = OTHER; note = 2'-O-Methyl nucleotide
  modified_base 12: mod_base = OTHER; note = 2'-fluoro nucleotide
  modified_base 13: mod_base = OTHER; note = 2'-O-Methyl nucleotide
  modified_base 14: mod_base = OTHER; note = 2'-fluoro nucleotide
  modified_base 15: mod_base = OTHER; note = 2'-O-Methyl nucleotide
  modified_base 16: mod_base = OTHER; note = 2'-fluoro nucleotide
  modified_base 17: mod_base = OTHER; note = 2'-O-Methyl nucleotide
  modified_base 18: mod_base = OTHER; note = 2'-fluoro nucleotide
  modified_base 19: mod_base = OTHER; note = 2'-O-Methyl nucleotide
  modified_base 20: mod_base = OTHER; note = deoxy-thymine phosphorothioate
  misc_feature 1..19: note = RNA
  misc_feature 20..21: note = DNA
tgactatgtcccgccactgtt

SEQ ID NO: 1550 - DNA, 21 bp, synthetic construct
  misc_feature 1..21: note = Description of Artificial Sequence: Synthetic oligonucleotide
  source 1..21: mol_type = other DNA
  modified_base 1: mod_base = OTHER; note = 2'-O-Methyl nucleotide
  modified_base 2: mod_base = OTHER; note = 2'-O-Methyl nucleotide
  modified_base 3: mod_base = OTHER; note = 2'-fluoro nucleotide
  modified_base 4: mod_base = OTHER; note = 2'-O-Methyl nucleotide
  modified_base 5: mod_base = OTHER; note = 2'-fluoro nucleotide
  modified_base 6: mod_base = OTHER; note = 2'-O-Methyl nucleotide
  modified_base 7: mod_base = OTHER; note = 2'-fluoro nucleotide
  modified_base 8: mod_base = OTHER; note = 2'-O-Methyl nucleotide
  modified_base 9: mod_base = OTHER; note = 2'-fluoro nucleotide
  modified_base 10: mod_base = OTHER; note = 2'-O-Methyl nucleotide
  modified_base 11: mod_base = OTHER; note = 2'-fluoro nucleotide
  modified_base 12: mod_base = OTHER; note = 2'-O-Methyl nucleotide
  modified_base 13: mod_base = OTHER; note = 2'-fluoro nucleotide
  modified_base 14: mod_base = OTHER; note = 2'-O-Methyl nucleotide
  modified_base 15: mod_base = OTHER; note = 2'-fluoro nucleotide
  modified_base 16: mod_base = OTHER; note = 2'-O-Methyl nucleotide
  modified_base 17: mod_base = OTHER; note = 2'-fluoro nucleotide
  modified_base 18: mod_base = OTHER; note = 2'-O-Methyl nucleotide
  modified_base 19: mod_base = OTHER; note = 2'-fluoro nucleotide
  modified_base 20: mod_base = OTHER; note = deoxy-thymine phosphorothioate
  misc_feature 1..19: note = RNA
  misc_feature 20..21: note = DNA
agtggcgggacatagtcagtt

SEQ ID NO: 1551 - DNA, 21 bp, synthetic construct
  misc_feature 1..21: note = Description of Artificial Sequence: Synthetic oligonucleotide
  source 1..21: mol_type = other DNA
  modified_base 1: mod_base = OTHER; note = 2'-fluoro nucleotide
  modified_base 2: mod_base = OTHER; note = 2'-fluoro nucleotide
  modified_base 3: mod_base = OTHER; note = 2'-O-Methyl nucleotide
  modified_base 4: mod_base = OTHER; note = 2'-fluoro nucleotide
  modified_base 5: mod_base = OTHER; note = 2'-O-Methyl nucleotide
  modified_base 6: mod_base = OTHER; note = 2'-fluoro nucleotide
  modified_base 7: mod_base = OTHER; note = 2'-O-Methyl nucleotide
  modified_base 8: mod_base = OTHER; note = 2'-fluoro nucleotide
  modified_base 9: mod_base = OTHER; note = 2'-O-Methyl nucleotide
  modified_base 10: mod_base = OTHER; note = 2'-fluoro nucleotide
  modified_base 11: mod_base = OTHER; note = 2'-O-Methyl nucleotide
  modified_base 12: mod_base = OTHER; note = 2'-fluoro nucleotide
  modified_base 13: mod_base = OTHER; note = 2'-O-Methyl nucleotide
  modified_base 14: mod_base = OTHER; note = 2'-fluoro nucleotide
  modified_base 15: mod_base = OTHER; note = 2'-O-Methyl nucleotide
  modified_base 16: mod_base = OTHER; note = 2'-fluoro nucleotide
  modified_base 17: mod_base = OTHER; note = 2'-O-Methyl nucleotide
  modified_base 18: mod_base = OTHER; note = 2'-fluoro nucleotide
  modified_base 19: mod_base = OTHER; note = 2'-O-Methyl nucleotide
  modified_base 20: mod_base = OTHER; note = deoxy-thymine phosphorothioate
  misc_feature 1..19: note = RNA
  misc_feature 20..21: note = DNA
ctgactatgtcccgccacttt

SEQ ID NO: 1552 - DNA, 21 bp, synthetic construct
  misc_feature 1..21: note = Description of Artificial Sequence: Synthetic oligonucleotide
  source 1..21: mol_type = other DNA
  modified_base 1: mod_base = OTHER; note = 2'-O-Methyl nucleotide
  modified_base 2: mod_base = OTHER; note = 2'-O-Methyl nucleotide
  modified_base 3: mod_base = OTHER; note = 2'-fluoro nucleotide
  modified_base 4: mod_base = OTHER; note = 2'-O-Methyl nucleotide
  modified_base 5: mod_base = OTHER; note = 2'-fluoro nucleotide
  modified_base 6: mod_base = OTHER; note = 2'-O-Methyl nucleotide
  modified_base 7: mod_base = OTHER; note = 2'-fluoro nucleotide
  modified_base 8: mod_base = OTHER; note = 2'-O-Methyl nucleotide
  modified_base 9: mod_base = OTHER; note = 2'-fluoro nucleotide
  modified_base 10: mod_base = OTHER; note = 2'-O-Methyl nucleotide
  modified_base 11: mod_base = OTHER; note = 2'-fluoro nucleotide
  modified_base 12: mod_base = OTHER; note = 2'-O-Methyl nucleotide
  modified_base 13: mod_base = OTHER; note = 2'-fluoro nucleotide
  modified_base 14: mod_base = OTHER; note = 2'-O-Methyl nucleotide
  modified_base 15: mod_base = OTHER; note = 2'-fluoro nucleotide
  modified_base 16: mod_base = OTHER; note = 2'-O-Methyl nucleotide
  modified_base 17: mod_base = OTHER; note = 2'-fluoro nucleotide
  modified_base 18: mod_base = OTHER; note = 2'-O-Methyl nucleotide
  modified_base 19: mod_base = OTHER; note = 2'-fluoro nucleotide
  modified_base 20: mod_base = OTHER; note = deoxy-thymine phosphorothioate
  misc_feature 1..19: note = RNA
  misc_feature 20..21: note = DNA
tggcgggacatagtcagcatt

SEQ ID NO: 1553 - DNA, 21 bp, synthetic construct
  misc_feature 1..21: note = Description of Artificial Sequence: Synthetic oligonucleotide
  source 1..21: mol_type = other DNA
  modified_base 1: mod_base = OTHER; note = 2'-fluoro nucleotide
  modified_base 2: mod_base = OTHER; note = 2'-fluoro nucleotide
  modified_base 3: mod_base = OTHER; note = 2'-O-Methyl nucleotide
  modified_base 4: mod_base = OTHER; note = 2'-fluoro nucleotide
  modified_base 5: mod_base = OTHER; note = 2'-O-Methyl nucleotide
  modified_base 6: mod_base = OTHER; note = 2'-fluoro nucleotide
  modified_base 7: mod_base = OTHER; note = 2'-O-Methyl nucleotide
  modified_base 8: mod_base = OTHER; note = 2'-fluoro nucleotide
  modified_base 9: mod_base = OTHER; note = 2'-O-Methyl nucleotide
  modified_base 10: mod_base = OTHER; note = 2'-fluoro nucleotide
  modified_base 11: mod_base = OTHER; note = 2'-O-Methyl nucleotide
  modified_base 12: mod_base = OTHER; note = 2'-fluoro nucleotide
  modified_base 13: mod_base = OTHER; note = 2'-O-Methyl nucleotide
  modified_base 14: mod_base = OTHER; note = 2'-fluoro nucleotide
  modified_base 15: mod_base = OTHER; note = 2'-O-Methyl nucleotide
  modified_base 16: mod_base = OTHER; note = 2'-fluoro nucleotide
  modified_base 17: mod_base = OTHER; note = 2'-O-Methyl nucleotide
  modified_base 18: mod_base = OTHER; note = 2'-fluoro nucleotide
  modified_base 19: mod_base = OTHER; note = 2'-O-Methyl nucleotide
  modified_base 20: mod_base = OTHER; note = deoxy-thymine phosphorothioate
  misc_feature 1..19: note = RNA
  misc_feature 20..21: note = DNA
tgctgactatgtcccgccatt

SEQ ID NO: 1554 - DNA, 21 bp, synthetic construct
  misc_feature 1..21: note = Description of Artificial Sequence: Synthetic oligonucleotide
  source 1..21: mol_type = other DNA
  modified_base 1: mod_base = OTHER; note = 2'-O-Methyl nucleotide
  modified_base 2: mod_base = OTHER; note = 2'-O-Methyl nucleotide
  modified_base 3: mod_base = OTHER; note = 2'-fluoro nucleotide
  modified_base 4: mod_base = OTHER; note = 2'-O-Methyl nucleotide
  modified_base 5: mod_base = OTHER; note = 2'-fluoro nucleotide
  modified_base 6: mod_base = OTHER; note = 2'-O-Methyl nucleotide
  modified_base 7: mod_base = OTHER; note = 2'-fluoro nucleotide
  modified_base 8: mod_base = OTHER; note = 2'-O-Methyl nucleotide
  modified_base 9: mod_base = OTHER; note = 2'-fluoro nucleotide
  modified_base 10: mod_base = OTHER; note = 2'-O-Methyl nucleotide
  modified_base 11: mod_base = OTHER; note = 2'-fluoro nucleotide
  modified_base 12: mod_base = OTHER; note = 2'-O-Methyl nucleotide
  modified_base 13: mod_base = OTHER; note = 2'-fluoro nucleotide
  modified_base 14: mod_base = OTHER; note = 2'-O-Methyl nucleotide
  modified_base 15: mod_base = OTHER; note = 2'-fluoro nucleotide
  modified_base 16: mod_base = OTHER; note = 2'-O-Methyl nucleotide
  modified_base 17: mod_base = OTHER; note = 2'-fluoro nucleotide
  modified_base 18: mod_base = OTHER; note = 2'-O-Methyl nucleotide
  modified_base 19: mod_base = OTHER; note = 2'-fluoro nucleotide
  modified_base 20: mod_base = OTHER; note = deoxy-thymine phosphorothioate
  misc_feature 1..19: note = RNA
  misc_feature 20..21: note = DNA
ggcgggacatagtcagcagtt

SEQ ID NO: 1555 - DNA, 21 bp, synthetic construct
  misc_feature 1..21: note = Description of Artificial Sequence: Synthetic oligonucleotide
  source 1..21: mol_type = other DNA
  modified_base 1: mod_base = OTHER; note = 2'-fluoro nucleotide
  modified_base 2: mod_base = OTHER; note = 2'-fluoro nucleotide
  modified_base 3: mod_base = OTHER; note = 2'-O-Methyl nucleotide
  modified_base 4: mod_base = OTHER; note = 2'-fluoro nucleotide
  modified_base 5: mod_base = OTHER; note = 2'-O-Methyl nucleotide
  modified_base 6: mod_base = OTHER; note = 2'-fluoro nucleotide
  modified_base 7: mod_base = OTHER; note = 2'-O-Methyl nucleotide
  modified_base 8: mod_base = OTHER; note = 2'-fluoro nucleotide
  modified_base 9: mod_base = OTHER; note = 2'-O-Methyl nucleotide
  modified_base 10: mod_base = OTHER; note = 2'-fluoro nucleotide
  modified_base 11: mod_base = OTHER; note = 2'-O-Methyl nucleotide
  modified_base 12: mod_base = OTHER; note = 2'-fluoro nucleotide
  modified_base 13: mod_base = OTHER; note = 2'-O-Methyl nucleotide
  modified_base 14: mod_base = OTHER; note = 2'-fluoro nucleotide
  modified_base 15: mod_base = OTHER; note = 2'-O-Methyl nucleotide
  modified_base 16: mod_base = OTHER; note = 2'-fluoro nucleotide
  modified_base 17: mod_base = OTHER; note = 2'-O-Methyl nucleotide
  modified_base 18: mod_base = OTHER; note = 2'-fluoro nucleotide
  modified_base 19: mod_base = OTHER; note = 2'-O-Methyl nucleotide
  modified_base 20: mod_base = OTHER; note = deoxy-thymine phosphorothioate
  misc_feature 1..19: note = RNA
  misc_feature 20..21: note = DNA
ctgctgactatgtcccgcctt

SEQ ID NO: 1556 - DNA, 21 bp, synthetic construct
  misc_feature 1..21: note = Description of Artificial Sequence: Synthetic oligonucleotide
  source 1..21: mol_type = other DNA
  modified_base 1: mod_base = OTHER; note = 2'-O-Methyl nucleotide
  modified_base 2: mod_base = OTHER; note = 2'-O-Methyl nucleotide
  modified_base 3: mod_base = OTHER; note = 2'-fluoro nucleotide
  modified_base 4: mod_base = OTHER; note = 2'-O-Methyl nucleotide
  modified_base 5: mod_base = OTHER; note = 2'-fluoro nucleotide
  modified_base 6: mod_base = OTHER; note = 2'-O-Methyl nucleotide
  modified_base 7: mod_base = OTHER; note = 2'-fluoro nucleotide
  modified_base 8: mod_base = OTHER; note = 2'-O-Methyl nucleotide
  modified_base 9: mod_base = OTHER; note = 2'-fluoro nucleotide
  modified_base 10: mod_base = OTHER; note = 2'-O-Methyl nucleotide
  modified_base 11: mod_base = OTHER; note = 2'-fluoro nucleotide
  modified_base 12: mod_base = OTHER; note = 2'-O-Methyl nucleotide
  modified_base 13: mod_base = OTHER; note = 2'-fluoro nucleotide
  modified_base 14: mod_base = OTHER; note = 2'-O-Methyl nucleotide
  modified_base 15: mod_base = OTHER; note = 2'-fluoro nucleotide
  modified_base 16: mod_base = OTHER; note = 2'-O-Methyl nucleotide
  modified_base 17: mod_base = OTHER; note = 2'-fluoro nucleotide
  modified_base 18: mod_base = OTHER; note = 2'-O-Methyl nucleotide
  modified_base 19: mod_base = OTHER; note = 2'-fluoro nucleotide
  modified_base 20: mod_base = OTHER; note = deoxy-thymine phosphorothioate
  misc_feature 1..19: note = RNA
  misc_feature 20..21: note = DNA
ctcagcaacatgtcgatggtt

SEQ ID NO: 1557 - DNA, 21 bp, synthetic construct
  misc_feature 1..21: note = Description of Artificial Sequence: Synthetic oligonucleotide
  source 1..21: mol_type = other DNA
  modified_base 1: mod_base = OTHER; note = 2'-fluoro nucleotide
  modified_base 2: mod_base = OTHER; note = 2'-fluoro nucleotide
  modified_base 3: mod_base = OTHER; note = 2'-O-Methyl nucleotide
  modified_base 4: mod_base = OTHER; note = 2'-fluoro nucleotide
  modified_base 5: mod_base = OTHER; note = 2'-O-Methyl nucleotide
  modified_base 6: mod_base = OTHER; note = 2'-fluoro nucleotide
  modified_base 7: mod_base = OTHER; note = 2'-O-Methyl nucleotide
  modified_base 8: mod_base = OTHER; note = 2'-fluoro nucleotide
  modified_base 9: mod_base = OTHER; note = 2'-O-Methyl nucleotide
  modified_base 10: mod_base = OTHER; note = 2'-fluoro nucleotide
  modified_base 11: mod_base = OTHER; note = 2'-O-Methyl nucleotide
  modified_base 12: mod_base = OTHER; note = 2'-fluoro nucleotide
  modified_base 13: mod_base = OTHER; note = 2'-O-Methyl nucleotide
  modified_base 14: mod_base = OTHER; note = 2'-fluoro nucleotide
  modified_base 15: mod_base = OTHER; note = 2'-O-Methyl nucleotide
  modified_base 16: mod_base = OTHER; note = 2'-fluoro nucleotide
  modified_base 17: mod_base = OTHER; note = 2'-O-Methyl nucleotide
  modified_base 18: mod_base = OTHER; note = 2'-fluoro nucleotide
  modified_base 19: mod_base = OTHER; note = 2'-O-Methyl nucleotide
  modified_base 20: mod_base = OTHER; note = deoxy-thymine phosphorothioate
  misc_feature 1..19: note = RNA
  misc_feature 20..21: note = DNA
ccatcgacatgttgctgagtt

SEQ ID NO: 1558 - DNA, 21 bp, synthetic construct
  misc_feature 1..21: note = Description of Artificial Sequence: Synthetic oligonucleotide
  source 1..21: mol_type = other DNA
  modified_base 1: mod_base = OTHER; note = 2'-O-Methyl nucleotide
  modified_base 2: mod_base = OTHER; note = 2'-O-Methyl nucleotide
  modified_base 3: mod_base = OTHER; note = 2'-fluoro nucleotide
  modified_base 4: mod_base = OTHER; note = 2'-O-Methyl nucleotide
  modified_base 5: mod_base = OTHER; note = 2'-fluoro nucleotide
  modified_base 6: mod_base = OTHER; note = 2'-O-Methyl nucleotide
  modified_base 7: mod_base = OTHER; note = 2'-fluoro nucleotide
  modified_base 8: mod_base = OTHER; note = 2'-O-Methyl nucleotide
  modified_base 9: mod_base = OTHER; note = 2'-fluoro nucleotide
  modified_base 10: mod_base = OTHER; note = 2'-O-Methyl nucleotide
  modified_base 11: mod_base = OTHER; note = 2'-fluoro nucleotide
  modified_base 12: mod_base = OTHER; note = 2'-O-Methyl nucleotide
  modified_base 13: mod_base = OTHER; note = 2'-fluoro nucleotide
  modified_base 14: mod_base = OTHER; note = 2'-O-Methyl nucleotide
  modified_base 15: mod_base = OTHER; note = 2'-fluoro nucleotide
  modified_base 16: mod_base = OTHER; note = 2'-O-Methyl nucleotide
  modified_base 17: mod_base = OTHER; note = 2'-fluoro nucleotide
  modified_base 18: mod_base = OTHER; note = 2'-O-Methyl nucleotide
  modified_base 19: mod_base = OTHER; note = 2'-fluoro nucleotide
  modified_base 20: mod_base = OTHER; note = deoxy-thymine phosphorothioate
  misc_feature 1..19: note = RNA
  misc_feature 20..21: note = DNA
cagcaacatgtcgatggactt

SEQ ID NO: 1559 - DNA, 21 bp, synthetic construct
  misc_feature 1..21: note = Description of Artificial Sequence: Synthetic oligonucleotide
  source 1..21: mol_type = other DNA
  modified_base 1: mod_base = OTHER; note = 2'-fluoro nucleotide
  modified_base 2: mod_base = OTHER; note = 2'-fluoro nucleotide
  modified_base 3: mod_base = OTHER; note = 2'-O-Methyl nucleotide
  modified_base 4: mod_base = OTHER; note = 2'-fluoro nucleotide
  modified_base 5: mod_base = OTHER; note = 2'-O-Methyl nucleotide
  modified_base 6: mod_base = OTHER; note = 2'-fluoro nucleotide
  modified_base 7: mod_base = OTHER; note = 2'-O-Methyl nucleotide
  modified_base 8: mod_base = OTHER; note = 2'-fluoro nucleotide
  modified_base 9: mod_base = OTHER; note = 2'-O-Methyl nucleotide
  modified_base 10: mod_base = OTHER; note = 2'-fluoro nucleotide
  modified_base 11: mod_base = OTHER; note = 2'-O-Methyl nucleotide
  modified_base 12: mod_base = OTHER; note = 2'-fluoro nucleotide
  modified_base 13: mod_base = OTHER; note = 2'-O-Methyl nucleotide
  modified_base 14: mod_base = OTHER; note = 2'-fluoro nucleotide
  modified_base 15: mod_base = OTHER; note = 2'-O-Methyl nucleotide
  modified_base 16: mod_base = OTHER; note = 2'-fluoro nucleotide
  modified_base 17: mod_base = OTHER; note = 2'-O-Methyl nucleotide
  modified_base 18: mod_base = OTHER; note = 2'-fluoro nucleotide
  modified_base 19: mod_base = OTHER; note = 2'-O-Methyl nucleotide
  modified_base 20: mod_base = OTHER; note = deoxy-thymine phosphorothioate
  misc_feature 1..19: note = RNA
  misc_feature 20..21: note = DNA
gtccatcgacatgttgctgtt

SEQ ID NO: 1560 - DNA, 21 bp, synthetic construct
  misc_feature 1..21: note = Description of Artificial Sequence: Synthetic oligonucleotide
  source 1..21: mol_type = other DNA
  modified_base 1: mod_base = OTHER; note = 2'-O-Methyl nucleotide
  modified_base 2: mod_base = OTHER; note = 2'-O-Methyl nucleotide
  modified_base 3: mod_base = OTHER; note = 2'-fluoro nucleotide
  modified_base 4: mod_base = OTHER; note = 2'-O-Methyl nucleotide
  modified_base 5: mod_base = OTHER; note = 2'-fluoro nucleotide
  modified_base 6: mod_base = OTHER; note = 2'-O-Methyl nucleotide
  modified_base 7: mod_base = OTHER; note = 2'-fluoro nucleotide
  modified_base 8: mod_base = OTHER; note = 2'-O-Methyl nucleotide
  modified_base 9: mod_base = OTHER; note = 2'-fluoro nucleotide
  modified_base 10: mod_base = OTHER; note = 2'-O-Methyl nucleotide
  modified_base 11: mod_base = OTHER; note = 2'-fluoro nucleotide
  modified_base 12: mod_base = OTHER; note = 2'-O-Methyl nucleotide
  modified_base 13: mod_base = OTHER; note = 2'-fluoro nucleotide
  modified_base 14: mod_base = OTHER; note = 2'-O-Methyl nucleotide
  modified_base 15: mod_base = OTHER; note = 2'-fluoro nucleotide
  modified_base 16: mod_base = OTHER; note = 2'-O-Methyl nucleotide
  modified_base 17: mod_base = OTHER; note = 2'-fluoro nucleotide
  modified_base 18: mod_base = OTHER; note = 2'-O-Methyl nucleotide
  modified_base 19: mod_base = OTHER; note = 2'-fluoro nucleotide
  modified_base 20: mod_base = OTHER; note = deoxy-thymine phosphorothioate
  misc_feature 1..19: note = RNA
  misc_feature 20..21: note = DNA
agcaacatgtcgatggacttt

SEQ ID NO: 1561 - DNA, 21 bp, synthetic construct
  misc_feature 1..21: note = Description of Artificial Sequence: Synthetic oligonucleotide
  source 1..21: mol_type = other DNA
  modified_base 1: mod_base = OTHER; note = 2'-fluoro nucleotide
  modified_base 2: mod_base = OTHER; note = 2'-fluoro nucleotide
  modified_base 3: mod_base = OTHER; note = 2'-O-Methyl nucleotide
  modified_base 4: mod_base = OTHER; note = 2'-fluoro nucleotide
  modified_base 5: mod_base = OTHER; note = 2'-O-Methyl nucleotide
  modified_base 6: mod_base = OTHER; note = 2'-fluoro nucleotide
  modified_base 7: mod_base = OTHER; note = 2'-O-Methyl nucleotide
  modified_base 8: mod_base = OTHER; note = 2'-fluoro nucleotide
  modified_base 9: mod_base = OTHER; note = 2'-O-Methyl nucleotide
  modified_base 10: mod_base = OTHER; note = 2'-fluoro nucleotide
  modified_base 11: mod_base = OTHER; note = 2'-O-Methyl nucleotide
  modified_base 12: mod_base = OTHER; note = 2'-fluoro nucleotide
  modified_base 13: mod_base = OTHER; note = 2'-O-Methyl nucleotide
  modified_base 14: mod_base = OTHER; note = 2'-fluoro nucleotide
  modified_base 15: mod_base = OTHER; note = 2'-O-Methyl nucleotide
  modified_base 16: mod_base = OTHER; note = 2'-fluoro nucleotide
  modified_base 17: mod_base = OTHER; note = 2'-O-Methyl nucleotide
  modified_base 18: mod_base = OTHER; note = 2'-fluoro nucleotide
  modified_base 19: mod_base = OTHER; note = 2'-O-Methyl nucleotide
  modified_base 20: mod_base = OTHER; note = deoxy-thymine phosphorothioate
  misc_feature 1..19: note = RNA
  misc_feature 20..21: note = DNA
agtccatcgacatgttgcttt

SEQ ID NO: 1562 - DNA, 21 bp, synthetic construct
  misc_feature 1..21: note = Description of Artificial Sequence: Synthetic oligonucleotide
  source 1..21: mol_type = other DNA
  modified_base 1: mod_base = OTHER; note = 2'-O-Methyl nucleotide
  modified_base 2: mod_base = OTHER; note = 2'-O-Methyl nucleotide
  modified_base 3: mod_base = OTHER; note = 2'-fluoro nucleotide
  modified_base 4: mod_base = OTHER; note = 2'-O-Methyl nucleotide
  modified_base 5: mod_base = OTHER; note = 2'-fluoro nucleotide
  modified_base 6: mod_base = OTHER; note = 2'-O-Methyl nucleotide
  modified_base 7: mod_base = OTHER; note = 2'-fluoro nucleotide
  modified_base 8: mod_base = OTHER; note = 2'-O-Methyl nucleotide
  modified_base 9: mod_base = OTHER; note = 2'-fluoro nucleotide
  modified_base 10: mod_base = OTHER; note = 2'-O-Methyl nucleotide
  modified_base 11: mod_base = OTHER; note = 2'-fluoro nucleotide
  modified_base 12: mod_base = OTHER; note = 2'-O-Methyl nucleotide
  modified_base 13: mod_base = OTHER; note = 2'-fluoro nucleotide
  modified_base 14: mod_base = OTHER; note = 2'-O-Methyl nucleotide
  modified_base 15: mod_base = OTHER; note = 2'-fluoro nucleotide
  modified_base 16: mod_base = OTHER; note = 2'-O-Methyl nucleotide
  modified_base 17: mod_base = OTHER; note = 2'-fluoro nucleotide
  modified_base 18: mod_base = OTHER; note = 2'-O-Methyl nucleotide
  modified_base 19: mod_base = OTHER; note = 2'-fluoro nucleotide
  modified_base 20: mod_base = OTHER; note = deoxy-thymine phosphorothioate
  misc_feature 1..19: note = RNA
  misc_feature 20..21: note = DNA
gcaacatgtcgatggactttt

SEQ ID NO: 1563 - DNA, 21 bp, synthetic construct
  misc_feature 1..21: note = Description of Artificial Sequence: Synthetic oligonucleotide
  source 1..21: mol_type = other DNA
  modified_base 1: mod_base = OTHER; note = 2'-fluoro nucleotide
  modified_base 2: mod_base = OTHER; note = 2'-fluoro nucleotide
  modified_base 3: mod_base = OTHER; note = 2'-O-Methyl nucleotide
  modified_base 4: mod_base = OTHER; note = 2'-fluoro nucleotide
  modified_base 5: mod_base = OTHER; note = 2'-O-Methyl nucleotide
  modified_base 6: mod_base = OTHER; note = 2'-fluoro nucleotide
  modified_base 7: mod_base = OTHER; note = 2'-O-Methyl nucleotide
  modified_base 8: mod_base = OTHER; note = 2'-fluoro nucleotide
  modified_base 9: mod_base = OTHER; note = 2'-O-Methyl nucleotide
  modified_base 10: mod_base = OTHER; note = 2'-fluoro nucleotide
  modified_base 11: mod_base = OTHER; note = 2'-O-Methyl nucleotide
  modified_base 12: mod_base = OTHER; note = 2'-fluoro nucleotide
  modified_base 13: mod_base = OTHER; note = 2'-O-Methyl nucleotide
  modified_base 14: mod_base = OTHER; note = 2'-fluoro nucleotide
  modified_base 15: mod_base = OTHER; note = 2'-O-Methyl nucleotide
  modified_base 16: mod_base = OTHER; note = 2'-fluoro nucleotide
  modified_base 17: mod_base = OTHER; note = 2'-O-Methyl nucleotide
  modified_base 18: mod_base = OTHER; note = 2'-fluoro nucleotide
  modified_base 19: mod_base = OTHER; note = 2'-O-Methyl nucleotide
  modified_base 20: mod_base = OTHER; note = deoxy-thymine phosphorothioate
  misc_feature 1..19: note = RNA
  misc_feature 20..21: note = DNA
aagtccatcgacatgttgctt

SEQ ID NO: 1564 - DNA, 21 bp, synthetic construct
  misc_feature 1..21: note = Description of Artificial Sequence: Synthetic oligonucleotide
  source 1..21: mol_type = other DNA
  modified_base 1: mod_base = OTHER; note = 2'-O-Methyl nucleotide
  modified_base 2: mod_base = OTHER; note = 2'-O-Methyl nucleotide
  modified_base 3: mod_base = OTHER; note = 2'-fluoro nucleotide
  modified_base 4: mod_base = OTHER; note = 2'-O-Methyl nucleotide
  modified_base 5: mod_base = OTHER; note = 2'-fluoro nucleotide
  modified_base 6: mod_base = OTHER; note = 2'-O-Methyl nucleotide
  modified_base 7: mod_base = OTHER; note = 2'-fluoro nucleotide
  modified_base 8: mod_base = OTHER; note = 2'-O-Methyl nucleotide
  modified_base 9: mod_base = OTHER; note = 2'-fluoro nucleotide
  modified_base 10: mod_base = OTHER; note = 2'-O-Methyl nucleotide
  modified_base 11: mod_base = OTHER; note = 2'-fluoro nucleotide
  modified_base 12: mod_base = OTHER; note = 2'-O-Methyl nucleotide
  modified_base 13: mod_base = OTHER; note = 2'-fluoro nucleotide
  modified_base 14: mod_base = OTHER; note = 2'-O-Methyl nucleotide
  modified_base 15: mod_base = OTHER; note = 2'-fluoro nucleotide
  modified_base 16: mod_base = OTHER; note = 2'-O-Methyl nucleotide
  modified_base 17: mod_base = OTHER; note = 2'-fluoro nucleotide
  modified_base 18: mod_base = OTHER; note = 2'-O-Methyl nucleotide
  modified_base 19: mod_base = OTHER; note = 2'-fluoro nucleotide
  modified_base 20: mod_base = OTHER; note = deoxy-thymine phosphorothioate
  misc_feature 1..19: note = RNA
  misc_feature 20..21: note = DNA
aacatgtcgatggacttcctt

SEQ ID NO: 1565 - DNA, 21 bp, synthetic construct
  misc_feature 1..21: note = Description of Artificial Sequence: Synthetic oligonucleotide
  source 1..21: mol_type = other DNA
  modified_base 1: mod_base = OTHER; note = 2'-fluoro nucleotide
  modified_base 2: mod_base = OTHER; note = 2'-fluoro nucleotide
  modified_base 3: mod_base = OTHER; note = 2'-O-Methyl nucleotide
  modified_base 4: mod_base = OTHER; note = 2'-fluoro nucleotide
  modified_base 5: mod_base = OTHER; note = 2'-O-Methyl nucleotide
  modified_base 6: mod_base = OTHER; note = 2'-fluoro nucleotide
  modified_base 7: mod_base = OTHER; note = 2'-O-Methyl nucleotide
  modified_base 8: mod_base = OTHER; note = 2'-fluoro nucleotide
  modified_base 9: mod_base = OTHER; note = 2'-O-Methyl nucleotide
  modified_base 10: mod_base = OTHER; note = 2'-fluoro nucleotide
  modified_base 11: mod_base = OTHER; note = 2'-O-Methyl nucleotide
  modified_base 12: mod_base = OTHER; note = 2'-fluoro nucleotide
  modified_base 13: mod_base = OTHER; note = 2'-O-Methyl nucleotide
  modified_base 14: mod_base = OTHER; note = 2'-fluoro nucleotide
  modified_base 15: mod_base = OTHER; note = 2'-O-Methyl nucleotide
  modified_base 16: mod_base = OTHER; note = 2'-fluoro nucleotide
  modified_base 17: mod_base = OTHER; note = 2'-O-Methyl nucleotide
  modified_base 18: mod_base = OTHER; note = 2'-fluoro nucleotide
  modified_base 19: mod_base = OTHER; note = 2'-O-Methyl nucleotide
  modified_base 20: mod_base = OTHER; note = deoxy-thymine phosphorothioate
  misc_feature 1..19: note = RNA
  misc_feature 20..21: note = DNA
ggaagtccatcgacatgtttt

SEQ ID NO: 1566 - DNA, 21 bp, synthetic construct
  misc_feature 1..21: note = Description of Artificial Sequence: Synthetic oligonucleotide
  source 1..21: mol_type = other DNA
  modified_base 1: mod_base = OTHER; note = 2'-O-Methyl nucleotide
  modified_base 2: mod_base = OTHER; note = 2'-O-Methyl nucleotide
  modified_base 3: mod_base = OTHER; note = 2'-fluoro nucleotide
  modified_base 4: mod_base = OTHER; note = 2'-O-Methyl nucleotide
  modified_base 5: mod_base = OTHER; note = 2'-fluoro nucleotide
  modified_base 6: mod_base = OTHER; note = 2'-O-Methyl nucleotide
  modified_base 7: mod_base = OTHER; note = 2'-fluoro nucleotide
  modified_base 8: mod_base = OTHER; note = 2'-O-Methyl nucleotide
  modified_base 9: mod_base = OTHER; note = 2'-fluoro nucleotide
  modified_base 10: mod_base = OTHER; note = 2'-O-Methyl nucleotide
  modified_base 11: mod_base = OTHER; note = 2'-fluoro nucleotide
  modified_base 12: mod_base = OTHER; note = 2'-O-Methyl nucleotide
  modified_base 13: mod_base = OTHER; note = 2'-fluoro nucleotide
  modified_base 14: mod_base = OTHER; note = 2'-O-Methyl nucleotide
  modified_base 15: mod_base = OTHER; note = 2'-fluoro nucleotide
  modified_base 16: mod_base = OTHER; note = 2'-O-Methyl nucleotide
  modified_base 17: mod_base = OTHER; note = 2'-fluoro nucleotide
  modified_base 18: mod_base = OTHER; note = 2'-O-Methyl nucleotide
  modified_base 19: mod_base = OTHER; note = 2'-fluoro nucleotide
  modified_base 20: mod_base = OTHER; note = deoxy-thymine phosphorothioate
  misc_feature 1..19: note = RNA
  misc_feature 20..21: note = DNA
acatgtcgatggacttccatt

SEQ ID NO: 1567 - DNA, 21 bp, synthetic construct
  misc_feature 1..21: note = Description of Artificial Sequence: Synthetic oligonucleotide
  source 1..21: mol_type = other DNA
  modified_base 1: mod_base = OTHER; note = 2'-fluoro nucleotide
  modified_base 2: mod_base = OTHER; note = 2'-fluoro nucleotide
  modified_base 3: mod_base = OTHER; note = 2'-O-Methyl nucleotide
  modified_base 4: mod_base = OTHER; note = 2'-fluoro nucleotide
  modified_base 5: mod_base = OTHER; note = 2'-O-Methyl nucleotide
  modified_base 6: mod_base = OTHER; note = 2'-fluoro nucleotide
  modified_base 7: mod_base = OTHER; note = 2'-O-Methyl nucleotide
  modified_base 8: mod_base = OTHER; note = 2'-fluoro nucleotide
  modified_base 9: mod_base = OTHER; note = 2'-O-Methyl nucleotide
  modified_base 10: mod_base = OTHER; note = 2'-fluoro nucleotide
  modified_base 11: mod_base = OTHER; note = 2'-O-Methyl nucleotide
  modified_base 12: mod_base = OTHER; note = 2'-fluoro nucleotide
  modified_base 13: mod_base = OTHER; note = 2'-O-Methyl nucleotide
  modified_base 14: mod_base = OTHER; note = 2'-fluoro nucleotide
  modified_base 15: mod_base = OTHER; note = 2'-O-Methyl nucleotide
  modified_base 16: mod_base = OTHER; note = 2'-fluoro nucleotide
  modified_base 17: mod_base = OTHER; note = 2'-O-Methyl nucleotide
  modified_base 18: mod_base = OTHER; note = 2'-fluoro nucleotide
  modified_base 19: mod_base = OTHER; note = 2'-O-Methyl nucleotide
  modified_base 20: mod_base = OTHER; note = deoxy-thymine phosphorothioate
  misc_feature 1..19: note = RNA
  misc_feature 20..21: note = DNA
tggaagtccatcgacatgttt

SEQ ID NO: 1568 - DNA, 21 bp, synthetic construct
  misc_feature 1..21: note = Description of Artificial Sequence: Synthetic oligonucleotide
  source 1..21: mol_type = other DNA
  modified_base 1: mod_base = OTHER; note = 2'-O-Methyl nucleotide
  modified_base 2: mod_base = OTHER; note = 2'-O-Methyl nucleotide
  modified_base 3: mod_base = OTHER; note = 2'-fluoro nucleotide
  modified_base 4: mod_base = OTHER; note = 2'-O-Methyl nucleotide
  modified_base 5: mod_base = OTHER; note = 2'-fluoro nucleotide
  modified_base 6: mod_base = OTHER; note = 2'-O-Methyl nucleotide
  modified_base 7: mod_base = OTHER; note = 2'-fluoro nucleotide
  modified_base 8: mod_base = OTHER; note = 2'-O-Methyl nucleotide
  modified_base 9: mod_base = OTHER; note = 2'-fluoro nucleotide
  modified_base 10: mod_base = OTHER; note = 2'-O-Methyl nucleotide
  modified_base 11: mod_base = OTHER; note = 2'-fluoro nucleotide
  modified_base 12: mod_base = OTHER; note = 2'-O-Methyl nucleotide
  modified_base 13: mod_base = OTHER; note = 2'-fluoro nucleotide
  modified_base 14: mod_base = OTHER; note = 2'-O-Methyl nucleotide
  modified_base 15: mod_base = OTHER; note = 2'-fluoro nucleotide
  modified_base 16: mod_base = OTHER; note = 2'-O-Methyl nucleotide
  modified_base 17: mod_base = OTHER; note = 2'-fluoro nucleotide
  modified_base 18: mod_base = OTHER; note = 2'-O-Methyl nucleotide
  modified_base 19: mod_base = OTHER; note = 2'-fluoro nucleotide
  modified_base 20: mod_base = OTHER; note = deoxy-thymine phosphorothioate
  misc_feature 1..19: note = RNA
  misc_feature 20..21: note = DNA
catgtcgatggacttccagtt

SEQ ID NO: 1569 - DNA, 21 bp, synthetic construct
  misc_feature 1..21: note = Description of Artificial Sequence: Synthetic oligonucleotide
  source 1..21: mol_type = other DNA
  modified_base 1: mod_base = OTHER; note = 2'-fluoro nucleotide
  modified_base 2: mod_base = OTHER; note = 2'-fluoro nucleotide
  modified_base 3: mod_base = OTHER; note = 2'-O-Methyl nucleotide
  modified_base 4: mod_base = OTHER; note = 2'-fluoro nucleotide
  modified_base 5: mod_base = OTHER; note = 2'-O-Methyl nucleotide
  modified_base 6: mod_base = OTHER; note = 2'-fluoro nucleotide
  modified_base 7: mod_base = OTHER; note = 2'-O-Methyl nucleotide
  modified_base 8: mod_base = OTHER; note = 2'-fluoro nucleotide
  modified_base 9: mod_base = OTHER; note = 2'-O-Methyl nucleotide
  modified_base 10: mod_base = OTHER; note = 2'-fluoro nucleotide
  modified_base 11: mod_base = OTHER; note = 2'-O-Methyl nucleotide
  modified_base 12: mod_base = OTHER; note = 2'-fluoro nucleotide
  modified_base 13: mod_base = OTHER; note = 2'-O-Methyl nucleotide
  modified_base 14: mod_base = OTHER; note = 2'-fluoro nucleotide
  modified_base 15: mod_base = OTHER; note = 2'-O-Methyl nucleotide
  modified_base 16: mod_base = OTHER; note = 2'-fluoro nucleotide
  modified_base 17: mod_base = OTHER; note = 2'-O-Methyl nucleotide
  modified_base 18: mod_base = OTHER; note = 2'-fluoro nucleotide
  modified_base 19: mod_base = OTHER; note = 2'-O-Methyl nucleotide
  modified_base 20: mod_base = OTHER; note = deoxy-thymine phosphorothioate
  misc_feature 1..19: note = RNA
  misc_feature 20..21: note = DNA
ctggaagtccatcgacatgtt

SEQ ID NO: 1570 - DNA, 21 bp, synthetic construct
  misc_feature 1..21: note = Description of Artificial Sequence: Synthetic oligonucleotide
  source 1..21: mol_type = other DNA
  modified_base 1: mod_base = OTHER; note = 2'-O-Methyl nucleotide
  modified_base 2: mod_base = OTHER; note = 2'-O-Methyl nucleotide
  modified_base 3: mod_base = OTHER; note = 2'-fluoro nucleotide
  modified_base 4: mod_base = OTHER; note = 2'-O-Methyl nucleotide
  modified_base 5: mod_base = OTHER; note = 2'-fluoro nucleotide
  modified_base 6: mod_base = OTHER; note = 2'-O-Methyl nucleotide
  modified_base 7: mod_base = OTHER; note = 2'-fluoro nucleotide
  modified_base 8: mod_base = OTHER; note = 2'-O-Methyl nucleotide
  modified_base 9: mod_base = OTHER; note = 2'-fluoro nucleotide
  modified_base 10: mod_base = OTHER; note = 2'-O-Methyl nucleotide
  modified_base 11: mod_base = OTHER; note = 2'-fluoro nucleotide
  modified_base 12: mod_base = OTHER; note = 2'-O-Methyl nucleotide
  modified_base 13: mod_base = OTHER; note = 2'-fluoro nucleotide
  modified_base 14: mod_base = OTHER; note = 2'-O-Methyl nucleotide
  modified_base 15: mod_base = OTHER; note = 2'-fluoro nucleotide
  modified_base 16: mod_base = OTHER; note = 2'-O-Methyl nucleotide
  modified_base 17: mod_base = OTHER; note = 2'-fluoro nucleotide
  modified_base 18: mod_base = OTHER; note = 2'-O-Methyl nucleotide
  modified_base 19: mod_base = OTHER; note = 2'-fluoro nucleotide
  modified_base 20: mod_base = OTHER; note = deoxy-thymine phosphorothioate
  misc_feature 1..19: note = RNA
  misc_feature 20..21: note = DNA
atgtcgatggacttccagatt

SEQ ID NO: 1571 - DNA, 21 bp, synthetic construct
  misc_feature 1..21: note = Description of Artificial Sequence: Synthetic oligonucleotide
  source 1..21: mol_type = other DNA
  modified_base 1: mod_base = OTHER; note = 2'-fluoro nucleotide
  modified_base 2: mod_base = OTHER; note = 2'-fluoro nucleotide
  modified_base 3: mod_base = OTHER; note = 2'-O-Methyl nucleotide
  modified_base 4: mod_base = OTHER; note = 2'-fluoro nucleotide
  modified_base 5: mod_base = OTHER; note = 2'-O-Methyl nucleotide
  modified_base 6: mod_base = OTHER; note = 2'-fluoro nucleotide
  modified_base 7: mod_base = OTHER; note = 2'-O-Methyl nucleotide
  modified_base 8: mod_base = OTHER; note = 2'-fluoro nucleotide
  modified_base 9: mod_base = OTHER; note = 2'-O-Methyl nucleotide
  modified_base 10: mod_base = OTHER; note = 2'-fluoro nucleotide
  modified_base 11: mod_base = OTHER; note = 2'-O-Methyl nucleotide
  modified_base 12: mod_base = OTHER; note = 2'-fluoro nucleotide
  modified_base 13: mod_base = OTHER; note = 2'-O-Methyl nucleotide
  modified_base 14: mod_base = OTHER; note = 2'-fluoro nucleotide
  modified_base 15: mod_base = OTHER; note = 2'-O-Methyl nucleotide
  modified_base 16: mod_base = OTHER; note = 2'-fluoro nucleotide
  modified_base 17: mod_base = OTHER; note = 2'-O-Methyl nucleotide
  modified_base 18: mod_base = OTHER; note = 2'-fluoro nucleotide
  modified_base 19: mod_base = OTHER; note = 2'-O-Methyl nucleotide
  modified_base 20: mod_base = OTHER; note = deoxy-thymine phosphorothioate
  misc_feature 1..19: note = RNA
  misc_feature 20..21: note = DNA
tctggaagtccatcgacattt

SEQ ID NO: 1572 - DNA, 21 bp, synthetic construct
  misc_feature 1..21: note = Description of Artificial Sequence: Synthetic oligonucleotide
  source 1..21: mol_type = other DNA
  modified_base 1: mod_base = OTHER; note = 2'-O-Methyl nucleotide
  modified_base 2: mod_base = OTHER; note = 2'-O-Methyl nucleotide
  modified_base 3: mod_base = OTHER; note = 2'-fluoro nucleotide
  modified_base 4: mod_base = OTHER; note = 2'-O-Methyl nucleotide
  modified_base 5: mod_base = OTHER; note = 2'-fluoro nucleotide
  modified_base 6: mod_base = OTHER; note = 2'-O-Methyl nucleotide
  modified_base 7: mod_base = OTHER; note = 2'-fluoro nucleotide
  modified_base 8: mod_base = OTHER; note = 2'-O-Methyl nucleotide
  modified_base 9: mod_base = OTHER; note = 2'-fluoro nucleotide
  modified_base 10: mod_base = OTHER; note = 2'-O-Methyl nucleotide
  modified_base 11: mod_base = OTHER; note = 2'-fluoro nucleotide
  modified_base 12: mod_base = OTHER; note = 2'-O-Methyl nucleotide
  modified_base 13: mod_base = OTHER; note = 2'-fluoro nucleotide
  modified_base 14: mod_base = OTHER; note = 2'-O-Methyl nucleotide
  modified_base 15: mod_base = OTHER; note = 2'-fluoro nucleotide
  modified_base 16: mod_base = OTHER; note = 2'-O-Methyl nucleotide
  modified_base 17: mod_base = OTHER; note = 2'-fluoro nucleotide
  modified_base 18: mod_base = OTHER; note = 2'-O-Methyl nucleotide
  modified_base 19: mod_base = OTHER; note = 2'-fluoro nucleotide
  modified_base 20: mod_base = OTHER; note = deoxy-thymine phosphorothioate
  misc_feature 1..19: note = RNA
  misc_feature 20..21: note = DNA
tcgatggacttccagaacctt

SEQ ID NO: 1573 - DNA, 21 bp, synthetic construct
  misc_feature 1..21: note = Description of Artificial Sequence: Synthetic oligonucleotide
  source 1..21: mol_type = other DNA
  modified_base 1: mod_base = OTHER; note = 2'-fluoro nucleotide
  modified_base 2: mod_base = OTHER; note = 2'-fluoro nucleotide
  modified_base 3: mod_base = OTHER; note = 2'-O-Methyl nucleotide
  modified_base 4: mod_base = OTHER; note = 2'-fluoro nucleotide
  modified_base 5: mod_base = OTHER; note = 2'-O-Methyl nucleotide
  modified_base 6: mod_base = OTHER; note = 2'-fluoro nucleotide
  modified_base 7: mod_base = OTHER; note = 2'-O-Methyl nucleotide
  modified_base 8: mod_base = OTHER; note = 2'-fluoro nucleotide
  modified_base 9: mod_base = OTHER; note = 2'-O-Methyl nucleotide
  modified_base 10: mod_base = OTHER; note = 2'-fluoro nucleotide
  modified_base 11: mod_base = OTHER; note = 2'-O-Methyl nucleotide
  modified_base 12: mod_base = OTHER; note = 2'-fluoro nucleotide
  modified_base 13: mod_base = OTHER; note = 2'-O-Methyl nucleotide
  modified_base 14: mod_base = OTHER; note = 2'-fluoro nucleotide
  modified_base 15: mod_base = OTHER; note = 2'-O-Methyl nucleotide
  modified_base 16: mod_base = OTHER; note = 2'-fluoro nucleotide
  modified_base 17: mod_base = OTHER; note = 2'-O-Methyl nucleotide
  modified_base 18: mod_base = OTHER; note = 2'-fluoro nucleotide
  modified_base 19: mod_base = OTHER; note = 2'-O-Methyl nucleotide
  modified_base 20: mod_base = OTHER; note = deoxy-thymine phosphorothioate
  misc_feature 1..19: note = RNA
  misc_feature 20..21: note = DNA
ggttctggaagtccatcgatt

SEQ ID NO: 1574 - DNA, 21 bp, synthetic construct
  misc_feature 1..21: note = Description of Artificial Sequence: Synthetic oligonucleotide
  source 1..21: mol_type = other DNA
  modified_base 1: mod_base = OTHER; note = 2'-O-Methyl nucleotide
  modified_base 2: mod_base = OTHER; note = 2'-O-Methyl nucleotide
  modified_base 3: mod_base = OTHER; note = 2'-fluoro nucleotide
  modified_base 4: mod_base = OTHER; note = 2'-O-Methyl nucleotide
  modified_base 5: mod_base = OTHER; note = 2'-fluoro nucleotide
  modified_base 6: mod_base = OTHER; note = 2'-O-Methyl nucleotide
  modified_base 7: mod_base = OTHER; note = 2'-fluoro nucleotide
  modified_base 8: mod_base = OTHER; note = 2'-O-Methyl nucleotide
  modified_base 9: mod_base = OTHER; note = 2'-fluoro nucleotide
  modified_base 10: mod_base = OTHER; note = 2'-O-Methyl nucleotide
  modified_base 11: mod_base = OTHER; note = 2'-fluoro nucleotide
  modified_base 12: mod_base = OTHER; note = 2'-O-Methyl nucleotide
  modified_base 13: mod_base = OTHER; note = 2'-fluoro nucleotide
  modified_base 14: mod_base = OTHER; note = 2'-O-Methyl nucleotide
  modified_base 15: mod_base = OTHER; note = 2'-fluoro nucleotide
  modified_base 16: mod_base = OTHER; note = 2'-O-Methyl nucleotide
  modified_base 17: mod_base = OTHER; note = 2'-fluoro nucleotide
  modified_base 18: mod_base = OTHER; note = 2'-O-Methyl nucleotide
  modified_base 19: mod_base = OTHER; note = 2'-fluoro nucleotide
  modified_base 20: mod_base = OTHER; note = deoxy-thymine phosphorothioate
  misc_feature 1..19: note = RNA
  misc_feature 20..21: note = DNA
gaaccacctgggcagctgctt

SEQ ID NO: 1575 - DNA, 21 bp, synthetic construct
  misc_feature 1..21: note = Description of Artificial Sequence: Synthetic oligonucleotide
  source 1..21: mol_type = other DNA
  modified_base 1: mod_base = OTHER; note = 2'-fluoro nucleotide
  modified_base 2: mod_base = OTHER; note = 2'-fluoro nucleotide
  modified_base 3: mod_base = OTHER; note = 2'-O-Methyl nucleotide
  modified_base 4: mod_base = OTHER; note = 2'-fluoro nucleotide
  modified_base 5: mod_base = OTHER; note = 2'-O-Methyl nucleotide
  modified_base 6: mod_base = OTHER; note = 2'-fluoro nucleotide
  modified_base 7: mod_base = OTHER; note = 2'-O-Methyl nucleotide
  modified_base 8: mod_base = OTHER; note = 2'-fluoro nucleotide
  modified_base 9: mod_base = OTHER; note = 2'-O-Methyl nucleotide
  modified_base 10: mod_base = OTHER; note = 2'-fluoro nucleotide
  modified_base 11: mod_base = OTHER; note = 2'-O-Methyl nucleotide
  modified_base 12: mod_base = OTHER; note = 2'-fluoro nucleotide
  modified_base 13: mod_base = OTHER; note = 2'-O-Methyl nucleotide
  modified_base 14: mod_base = OTHER; note = 2'-fluoro nucleotide
  modified_base 15: mod_base = OTHER; note = 2'-O-Methyl nucleotide
  modified_base 16: mod_base = OTHER; note = 2'-fluoro nucleotide
  modified_base 17: mod_base = OTHER; note = 2'-O-Methyl nucleotide
  modified_base 18: mod_base = OTHER; note = 2'-fluoro nucleotide
  modified_base 19: mod_base = OTHER; note = 2'-O-Methyl nucleotide
  modified_base 20: mod_base = OTHER; note = deoxy-thymine phosphorothioate
  misc_feature 1..19: note = RNA
  misc_feature 20..21: note = DNA
gcagctgcccaggtggttctt

SEQ ID NO: 1576 - DNA, 21 bp, synthetic construct
  misc_feature 1..21: note = Description of Artificial Sequence: Synthetic oligonucleotide
  source 1..21: mol_type = other DNA
  modified_base 1: mod_base = OTHER; note = 2'-O-Methyl nucleotide
  modified_base 2: mod_base = OTHER; note = 2'-O-Methyl nucleotide
  modified_base 3: mod_base = OTHER; note = 2'-fluoro nucleotide
  modified_base 4: mod_base = OTHER; note = 2'-O-Methyl nucleotide
  modified_base 5: mod_base = OTHER; note = 2'-fluoro nucleotide
  modified_base 6: mod_base = OTHER; note = 2'-O-Methyl nucleotide
  modified_base 7: mod_base = OTHER; note = 2'-fluoro nucleotide
  modified_base 8: mod_base = OTHER; note = 2'-O-Methyl nucleotide
  modified_base 9: mod_base = OTHER; note = 2'-fluoro nucleotide
  modified_base 10: mod_base = OTHER; note = 2'-O-Methyl nucleotide
  modified_base 11: mod_base = OTHER; note = 2'-fluoro nucleotide
  modified_base 12: mod_base = OTHER; note = 2'-O-Methyl nucleotide
  modified_base 13: mod_base = OTHER; note = 2'-fluoro nucleotide
  modified_base 14: mod_base = OTHER; note = 2'-O-Methyl nucleotide
  modified_base 15: mod_base = OTHER; note = 2'-fluoro nucleotide
  modified_base 16: mod_base = OTHER; note = 2'-O-Methyl nucleotide
  modified_base 17: mod_base = OTHER; note = 2'-fluoro nucleotide
  modified_base 18: mod_base = OTHER; note = 2'-O-Methyl nucleotide
  modified_base 19: mod_base = OTHER; note = 2'-fluoro nucleotide
  modified_base 20: mod_base = OTHER; note = deoxy-thymine phosphorothioate
  misc_feature 1..19: note = RNA
  misc_feature 20..21: note = DNA
gggcagctgccaaaagtgttt

SEQ ID NO: 1577 - DNA, 21 bp, synthetic construct
  misc_feature 1..21: note = Description of Artificial Sequence: Synthetic oligonucleotide
  source 1..21: mol_type = other DNA
  modified_base 1: mod_base = OTHER; note = 2'-fluoro nucleotide
  modified_base 2: mod_base = OTHER; note = 2'-fluoro nucleotide
  modified_base 3: mod_base = OTHER; note = 2'-O-Methyl nucleotide
  modified_base 4: mod_base = OTHER; note = 2'-fluoro nucleotide
  modified_base 5: mod_base = OTHER; note = 2'-O-Methyl nucleotide
  modified_base 6: mod_base = OTHER; note = 2'-fluoro nucleotide
  modified_base 7: mod_base = OTHER; note = 2'-O-Methyl nucleotide
  modified_base 8: mod_base = OTHER; note = 2'-fluoro nucleotide
  modified_base 9: mod_base = OTHER; note = 2'-O-Methyl nucleotide
  modified_base 10: mod_base = OTHER; note = 2'-fluoro nucleotide
  modified_base 11: mod_base = OTHER; note = 2'-O-Methyl nucleotide
  modified_base 12: mod_base = OTHER; note = 2'-fluoro nucleotide
  modified_base 13: mod_base = OTHER; note = 2'-O-Methyl nucleotide
  modified_base 14: mod_base = OTHER; note = 2'-fluoro nucleotide
  modified_base 15: mod_base = OTHER; note = 2'-O-Methyl nucleotide
  modified_base 16: mod_base = OTHER; note = 2'-fluoro nucleotide
  modified_base 17: mod_base = OTHER; note = 2'-O-Methyl nucleotide
  modified_base 18: mod_base = OTHER; note = 2'-fluoro nucleotide
  modified_base 19: mod_base = OTHER; note = 2'-O-Methyl nucleotide
  modified_base 20: mod_base = OTHER; note = deoxy-thymine phosphorothioate
  misc_feature 1..19: note = RNA
  misc_feature 20..21: note = DNA
acacttttggcagctgccctt

SEQ ID NO: 1578 - DNA, 21 bp, synthetic construct
  misc_feature 1..21: note = Description of Artificial Sequence: Synthetic oligonucleotide
  source 1..21: mol_type = other DNA
  modified_base 1: mod_base = OTHER; note = 2'-O-Methyl nucleotide
  modified_base 2: mod_base = OTHER; note = 2'-O-Methyl nucleotide
  modified_base 3: mod_base = OTHER; note = 2'-fluoro nucleotide
  modified_base 4: mod_base = OTHER; note = 2'-O-Methyl nucleotide
  modified_base 5: mod_base = OTHER; note = 2'-fluoro nucleotide
  modified_base 6: mod_base = OTHER; note = 2'-O-Methyl nucleotide
  modified_base 7: mod_base = OTHER; note = 2'-fluoro nucleotide
  modified_base 8: mod_base = OTHER; note = 2'-O-Methyl nucleotide
  modified_base 9: mod_base = OTHER; note = 2'-fluoro nucleotide
  modified_base 10: mod_base = OTHER; note = 2'-O-Methyl nucleotide
  modified_base 11: mod_base = OTHER; note = 2'-fluoro nucleotide
  modified_base 12: mod_base = OTHER; note = 2'-O-Methyl nucleotide
  modified_base 13: mod_base = OTHER; note = 2'-fluoro nucleotide
  modified_base 14: mod_base = OTHER; note = 2'-O-Methyl nucleotide
  modified_base 15: mod_base = OTHER; note = 2'-fluoro nucleotide
  modified_base 16: mod_base = OTHER; note = 2'-O-Methyl nucleotide
  modified_base 17: mod_base = OTHER; note = 2'-fluoro nucleotide
  modified_base 18: mod_base = OTHER; note = 2'-O-Methyl nucleotide
  modified_base 19: mod_base = OTHER; note = 2'-fluoro nucleotide
  modified_base 20: mod_base = OTHER; note = deoxy-thymine phosphorothioate
  misc_feature 1..19: note = RNA
  misc_feature 20..21: note = DNA
gcagctgccaaaagtgtgatt

SEQ ID NO: 1579 - DNA, 21 bp, synthetic construct
  misc_feature 1..21: note = Description of Artificial Sequence: Synthetic oligonucleotide
  source 1..21: mol_type = other DNA
  modified_base 1: mod_base = OTHER; note = 2'-fluoro nucleotide
  modified_base 2: mod_base = OTHER; note = 2'-fluoro nucleotide
  modified_base 3: mod_base = OTHER; note = 2'-O-Methyl nucleotide
  modified_base 4: mod_base = OTHER; note = 2'-fluoro nucleotide
  modified_base 5: mod_base = OTHER; note = 2'-O-Methyl nucleotide
  modified_base 6: mod_base = OTHER; note = 2'-fluoro nucleotide
  modified_base 7: mod_base = OTHER; note = 2'-O-Methyl nucleotide
  modified_base 8: mod_base = OTHER; note = 2'-fluoro nucleotide
  modified_base 9: mod_base = OTHER; note = 2'-O-Methyl nucleotide
  modified_base 10: mod_base = OTHER; note = 2'-fluoro nucleotide
  modified_base 11: mod_base = OTHER; note = 2'-O-Methyl nucleotide
  modified_base 12: mod_base = OTHER; note = 2'-fluoro nucleotide
  modified_base 13: mod_base = OTHER; note = 2'-O-Methyl nucleotide
  modified_base 14: mod_base = OTHER; note = 2'-fluoro nucleotide
  modified_base 15: mod_base = OTHER; note = 2'-O-Methyl nucleotide
  modified_base 16: mod_base = OTHER; note = 2'-fluoro nucleotide
  modified_base 17: mod_base = OTHER; note = 2'-O-Methyl nucleotide
  modified_base 18: mod_base = OTHER; note = 2'-fluoro nucleotide
  modified_base 19: mod_base = OTHER; note = 2'-O-Methyl nucleotide
  modified_base 20: mod_base = OTHER; note = deoxy-thymine phosphorothioate
  misc_feature 1..19: note = RNA
  misc_feature 20..21: note = DNA
tcacacttttggcagctgctt

SEQ ID NO: 1580 - DNA, 21 bp, synthetic construct
  misc_feature 1..21: note = Description of Artificial Sequence: Synthetic oligonucleotide
  source 1..21: mol_type = other DNA
  modified_base 1: mod_base = OTHER; note = 2'-O-Methyl nucleotide
  modified_base 2: mod_base = OTHER; note = 2'-O-Methyl nucleotide
  modified_base 3: mod_base = OTHER; note = 2'-fluoro nucleotide
  modified_base 4: mod_base = OTHER; note = 2'-O-Methyl nucleotide
  modified_base 5: mod_base = OTHER; note = 2'-fluoro nucleotide
  modified_base 6: mod_base = OTHER; note = 2'-O-Methyl nucleotide
  modified_base 7: mod_base = OTHER; note = 2'-fluoro nucleotide
  modified_base 8: mod_base = OTHER; note = 2'-O-Methyl nucleotide
  modified_base 9: mod_base = OTHER; note = 2'-fluoro nucleotide
  modified_base 10: mod_base = OTHER; note = 2'-O-Methyl nucleotide
  modified_base 11: mod_base = OTHER; note = 2'-fluoro nucleotide
  modified_base 12: mod_base = OTHER; note = 2'-O-Methyl nucleotide
  modified_base 13: mod_base = OTHER; note = 2'-fluoro nucleotide
  modified_base 14: mod_base = OTHER; note = 2'-O-Methyl nucleotide
  modified_base 15: mod_base = OTHER; note = 2'-fluoro nucleotide
  modified_base 16: mod_base = OTHER; note = 2'-O-Methyl nucleotide
  modified_base 17: mod_base = OTHER; note = 2'-fluoro nucleotide
  modified_base 18: mod_base = OTHER; note = 2'-O-Methyl nucleotide
  modified_base 19: mod_base = OTHER; note = 2'-fluoro nucleotide
  modified_base 20: mod_base = OTHER; note = deoxy-thymine phosphorothioate
  misc_feature 1..19: note = RNA
  misc_feature 20..21: note = DNA
tgccaaaagtgtgatccaatt

SEQ ID NO: 1581 - DNA, 21 bp, synthetic construct
  misc_feature 1..21: note = Description of Artificial Sequence: Synthetic oligonucleotide
  source 1..21: mol_type = other DNA
  modified_base 1: mod_base = OTHER; note = 2'-fluoro nucleotide
  modified_base 2: mod_base = OTHER; note = 2'-fluoro nucleotide
  modified_base 3: mod_base = OTHER; note = 2'-O-Methyl nucleotide
  modified_base 4: mod_base = OTHER; note = 2'-fluoro nucleotide
  modified_base 5: mod_base = OTHER; note = 2'-O-Methyl nucleotide
  modified_base 6: mod_base = OTHER; note = 2'-fluoro nucleotide
  modified_base 7: mod_base = OTHER; note = 2'-O-Methyl nucleotide
  modified_base 8: mod_base = OTHER; note = 2'-fluoro nucleotide
  modified_base 9: mod_base = OTHER; note = 2'-O-Methyl nucleotide
  modified_base 10: mod_base = OTHER; note = 2'-fluoro nucleotide
  modified_base 11: mod_base = OTHER; note = 2'-O-Methyl nucleotide
  modified_base 12: mod_base = OTHER; note = 2'-fluoro nucleotide
  modified_base 13: mod_base = OTHER; note = 2'-O-Methyl nucleotide
  modified_base 14: mod_base = OTHER; note = 2'-fluoro nucleotide
  modified_base 15: mod_base = OTHER; note = 2'-O-Methyl nucleotide
  modified_base 16: mod_base = OTHER; note = 2'-fluoro nucleotide
  modified_base 17: mod_base = OTHER; note = 2'-O-Methyl nucleotide
  modified_base 18: mod_base = OTHER; note = 2'-fluoro nucleotide
  modified_base 19: mod_base = OTHER; note = 2'-O-Methyl nucleotide
  modified_base 20: mod_base = OTHER; note = deoxy-thymine phosphorothioate
  misc_feature 1..19: note = RNA
  misc_feature 20..21: note = DNA
ttggatcacacttttggcatt

SEQ ID NO: 1582 - DNA, 21 bp, synthetic construct
  misc_feature 1..21: note = Description of Artificial Sequence: Synthetic oligonucleotide
  source 1..21: mol_type = other DNA
  modified_base 1: mod_base = OTHER; note = 2'-O-Methyl nucleotide
  modified_base 2: mod_base = OTHER; note = 2'-O-Methyl nucleotide
  modified_base 3: mod_base = OTHER; note = 2'-fluoro nucleotide
  modified_base 4: mod_base = OTHER; note = 2'-O-Methyl nucleotide
  modified_base 5: mod_base = OTHER; note = 2'-fluoro nucleotide
  modified_base 6: mod_base = OTHER; note = 2'-O-Methyl nucleotide
  modified_base 7: mod_base = OTHER; note = 2'-fluoro nucleotide
  modified_base 8: mod_base = OTHER; note = 2'-O-Methyl nucleotide
  modified_base 9: mod_base = OTHER; note = 2'-fluoro nucleotide
  modified_base 10: mod_base = OTHER; note = 2'-O-Methyl nucleotide
  modified_base 11: mod_base = OTHER; note = 2'-fluoro nucleotide
  modified_base 12: mod_base = OTHER; note = 2'-O-Methyl nucleotide
  modified_base 13: mod_base = OTHER; note = 2'-fluoro nucleotide
  modified_base 14: mod_base = OTHER; note = 2'-O-Methyl nucleotide
  modified_base 15: mod_base = OTHER; note = 2'-fluoro nucleotide
  modified_base 16: mod_base = OTHER; note = 2'-O-Methyl nucleotide
  modified_base 17: mod_base = OTHER; note = 2'-fluoro nucleotide
  modified_base 18: mod_base = OTHER; note = 2'-O-Methyl nucleotide
  modified_base 19: mod_base = OTHER; note = 2'-fluoro nucleotide
  modified_base 20: mod_base = OTHER; note = deoxy-thymine phosphorothioate
  misc_feature 1..19: note = RNA
  misc_feature 20..21: note = DNA
gccaaaagtgtgatccaagtt

SEQ ID NO: 1583 - DNA, 21 bp, synthetic construct
  misc_feature 1..21: note = Description of Artificial Sequence: Synthetic oligonucleotide
  source 1..21: mol_type = other DNA
  modified_base 1: mod_base = OTHER; note = 2'-fluoro nucleotide
  modified_base 2: mod_base = OTHER; note = 2'-fluoro nucleotide
  modified_base 3: mod_base = OTHER; note = 2'-O-Methyl nucleotide
  modified_base 4: mod_base = OTHER; note = 2'-fluoro nucleotide
  modified_base 5: mod_base = OTHER; note = 2'-O-Methyl nucleotide
  modified_base 6: mod_base = OTHER; note = 2'-fluoro nucleotide
  modified_base 7: mod_base = OTHER; note = 2'-O-Methyl nucleotide
  modified_base 8: mod_base = OTHER; note = 2'-fluoro nucleotide
  modified_base 9: mod_base = OTHER; note = 2'-O-Methyl nucleotide
  modified_base 10: mod_base = OTHER; note = 2'-fluoro nucleotide
  modified_base 11: mod_base = OTHER; note = 2'-O-Methyl nucleotide
  modified_base 12: mod_base = OTHER; note = 2'-fluoro nucleotide
  modified_base 13: mod_base = OTHER; note = 2'-O-Methyl nucleotide
  modified_base 14: mod_base = OTHER; note = 2'-fluoro nucleotide
  modified_base 15: mod_base = OTHER; note = 2'-O-Methyl nucleotide
  modified_base 16: mod_base = OTHER; note = 2'-fluoro nucleotide
  modified_base 17: mod_base = OTHER; note = 2'-O-Methyl nucleotide
  modified_base 18: mod_base = OTHER; note = 2'-fluoro nucleotide
  modified_base 19: mod_base = OTHER; note = 2'-O-Methyl nucleotide
  modified_base 20: mod_base = OTHER; note = deoxy-thymine phosphorothioate
  misc_feature 1..19: note = RNA
  misc_feature 20..21: note = DNA
cttggatcacacttttggctt

SEQ ID NO: 1584 - DNA, 21 bp, synthetic construct
  misc_feature 1..21: note = Description of Artificial Sequence: Synthetic oligonucleotide
  source 1..21: mol_type = other DNA
  modified_base 1: mod_base = OTHER; note = 2'-O-Methyl nucleotide
  modified_base 2: mod_base = OTHER; note = 2'-O-Methyl nucleotide
  modified_base 3: mod_base = OTHER; note = 2'-fluoro nucleotide
  modified_base 4: mod_base = OTHER; note = 2'-O-Methyl nucleotide
  modified_base 5: mod_base = OTHER; note = 2'-fluoro nucleotide
  modified_base 6: mod_base = OTHER; note = 2'-O-Methyl nucleotide
  modified_base 7: mod_base = OTHER; note = 2'-fluoro nucleotide
  modified_base 8: mod_base = OTHER; note = 2'-O-Methyl nucleotide
  modified_base 9: mod_base = OTHER; note = 2'-fluoro nucleotide
  modified_base 10: mod_base = OTHER; note = 2'-O-Methyl nucleotide
  modified_base 11: mod_base = OTHER; note = 2'-fluoro nucleotide
  modified_base 12: mod_base = OTHER; note = 2'-O-Methyl nucleotide
  modified_base 13: mod_base = OTHER; note = 2'-fluoro nucleotide
  modified_base 14: mod_base = OTHER; note = 2'-O-Methyl nucleotide
  modified_base 15: mod_base = OTHER; note = 2'-fluoro nucleotide
  modified_base 16: mod_base = OTHER; note = 2'-O-Methyl nucleotide
  modified_base 17: mod_base = OTHER; note = 2'-fluoro nucleotide
  modified_base 18: mod_base = OTHER; note = 2'-O-Methyl nucleotide
  modified_base 19: mod_base = OTHER; note = 2'-fluoro nucleotide
  modified_base 20: mod_base = OTHER; note = deoxy-thymine phosphorothioate
  misc_feature 1..19: note = RNA
  misc_feature 20..21: note = DNA
ccaaaagtgtgatccaagctt

SEQ ID NO: 1585 - DNA, 21 bp, synthetic construct
  misc_feature 1..21: note = Description of Artificial Sequence: Synthetic oligonucleotide
  source 1..21: mol_type = other DNA
  modified_base 1: mod_base = OTHER; note = 2'-fluoro nucleotide
  modified_base 2: mod_base = OTHER; note = 2'-fluoro nucleotide
  modified_base 3: mod_base = OTHER; note = 2'-O-Methyl nucleotide
  modified_base 4: mod_base = OTHER; note = 2'-fluoro nucleotide
  modified_base 5: mod_base = OTHER; note = 2'-O-Methyl nucleotide
  modified_base 6: mod_base = OTHER; note = 2'-fluoro nucleotide
  modified_base 7: mod_base = OTHER; note = 2'-O-Methyl nucleotide
  modified_base 8: mod_base = OTHER; note = 2'-fluoro nucleotide
  modified_base 9: mod_base = OTHER; note = 2'-O-Methyl nucleotide
  modified_base 10: mod_base = OTHER; note = 2'-fluoro nucleotide
  modified_base 11: mod_base = OTHER; note = 2'-O-Methyl nucleotide
  modified_base 12: mod_base = OTHER; note = 2'-fluoro nucleotide
  modified_base 13: mod_base = OTHER; note = 2'-O-Methyl nucleotide
  modified_base 14: mod_base = OTHER; note = 2'-fluoro nucleotide
  modified_base 15: mod_base = OTHER; note = 2'-O-Methyl nucleotide
  modified_base 16: mod_base = OTHER; note = 2'-fluoro nucleotide
  modified_base 17: mod_base = OTHER; note = 2'-O-Methyl nucleotide
  modified_base 18: mod_base = OTHER; note = 2'-fluoro nucleotide
  modified_base 19: mod_base = OTHER; note = 2'-O-Methyl nucleotide
  modified_base 20: mod_base = OTHER; note = deoxy-thymine phosphorothioate
  misc_feature 1..19: note = RNA
  misc_feature 20..21: note = DNA
gcttggatcacacttttggtt

SEQ ID NO: 1586 - DNA, 21 bp, synthetic construct
  misc_feature 1..21: note = Description of Artificial Sequence: Synthetic oligonucleotide
  source 1..21: mol_type = other DNA
  modified_base 1: mod_base = OTHER; note = 2'-O-Methyl nucleotide
  modified_base 2: mod_base = OTHER; note = 2'-O-Methyl nucleotide
  modified_base 3: mod_base = OTHER; note = 2'-fluoro nucleotide
  modified_base 4: mod_base = OTHER; note = 2'-O-Methyl nucleotide
  modified_base 5: mod_base = OTHER; note = 2'-fluoro nucleotide
  modified_base 6: mod_base = OTHER; note = 2'-O-Methyl nucleotide
  modified_base 7: mod_base = OTHER; note = 2'-fluoro nucleotide
  modified_base 8: mod_base = OTHER; note = 2'-O-Methyl nucleotide
  modified_base 9: mod_base = OTHER; note = 2'-fluoro nucleotide
  modified_base 10: mod_base = OTHER; note = 2'-O-Methyl nucleotide
  modified_base 11: mod_base = OTHER; note = 2'-fluoro nucleotide
  modified_base 12: mod_base = OTHER; note = 2'-O-Methyl nucleotide
  modified_base 13: mod_base = OTHER; note = 2'-fluoro nucleotide
  modified_base 14: mod_base = OTHER; note = 2'-O-Methyl nucleotide
  modified_base 15: mod_base = OTHER; note = 2'-fluoro nucleotide
  modified_base 16: mod_base = OTHER; note = 2'-O-Methyl nucleotide
  modified_base 17: mod_base = OTHER; note = 2'-fluoro nucleotide
  modified_base 18: mod_base = OTHER; note = 2'-O-Methyl nucleotide
  modified_base 19: mod_base = OTHER; note = 2'-fluoro nucleotide
  modified_base 20: mod_base = OTHER; note = deoxy-thymine phosphorothioate
  misc_feature 1..19: note = RNA
  misc_feature 20..21: note = DNA
aaagtgtgatccaagctgttt

SEQ ID NO: 1587 - DNA, 21 bp, synthetic construct
  misc_feature 1..21: note = Description of Artificial Sequence: Synthetic oligonucleotide
  source 1..21: mol_type = other DNA
  modified_base 1: mod_base = OTHER; note = 2'-fluoro nucleotide
  modified_base 2: mod_base = OTHER; note = 2'-fluoro nucleotide
  modified_base 3: mod_base = OTHER; note = 2'-O-Methyl nucleotide
  modified_base 4: mod_base = OTHER; note = 2'-fluoro nucleotide
  modified_base 5: mod_base = OTHER; note = 2'-O-Methyl nucleotide
  modified_base 6: mod_base = OTHER; note = 2'-fluoro nucleotide
  modified_base 7: mod_base = OTHER; note = 2'-O-Methyl nucleotide
  modified_base 8: mod_base = OTHER; note = 2'-fluoro nucleotide
  modified_base 9: mod_base = OTHER; note = 2'-O-Methyl nucleotide
  modified_base 10: mod_base = OTHER; note = 2'-fluoro nucleotide
  modified_base 11: mod_base = OTHER; note = 2'-O-Methyl nucleotide
  modified_base 12: mod_base = OTHER; note = 2'-fluoro nucleotide
  modified_base 13: mod_base = OTHER; note = 2'-O-Methyl nucleotide
  modified_base 14: mod_base = OTHER; note = 2'-fluoro nucleotide
  modified_base 15: mod_base = OTHER; note = 2'-O-Methyl nucleotide
  modified_base 16: mod_base = OTHER; note = 2'-fluoro nucleotide
  modified_base 17: mod_base = OTHER; note = 2'-O-Methyl nucleotide
  modified_base 18: mod_base = OTHER; note = 2'-fluoro nucleotide
  modified_base 19: mod_base = OTHER; note = 2'-O-Methyl nucleotide
  modified_base 20: mod_base = OTHER; note = deoxy-thymine phosphorothioate
  misc_feature 1..19: note = RNA
  misc_feature 20..21: note = DNA
acagcttggatcacacttttt

SEQ ID NO: 1588 - DNA, 21 bp, synthetic construct
  misc_feature 1..21: note = Description of Artificial Sequence: Synthetic oligonucleotide
  source 1..21: mol_type = other DNA
  modified_base 1: mod_base = OTHER; note = 2'-O-Methyl nucleotide
  modified_base 2: mod_base = OTHER; note = 2'-O-Methyl nucleotide
  modified_base 3: mod_base = OTHER; note = 2'-fluoro nucleotide
  modified_base 4: mod_base = OTHER; note = 2'-O-Methyl nucleotide
  modified_base 5: mod_base = OTHER; note = 2'-fluoro nucleotide
  modified_base 6: mod_base = OTHER; note = 2'-O-Methyl nucleotide
  modified_base 7: mod_base = OTHER; note = 2'-fluoro nucleotide
  modified_base 8: mod_base = OTHER; note = 2'-O-Methyl nucleotide
  modified_base 9: mod_base = OTHER; note = 2'-fluoro nucleotide
  modified_base 10: mod_base = OTHER; note = 2'-O-Methyl nucleotide
  modified_base 11: mod_base = OTHER; note = 2'-fluoro nucleotide
  modified_base 12: mod_base = OTHER; note = 2'-O-Methyl nucleotide
  modified_base 13: mod_base = OTHER; note = 2'-fluoro nucleotide
  modified_base 14: mod_base = OTHER; note = 2'-O-Methyl nucleotide
  modified_base 15: mod_base = OTHER; note = 2'-fluoro nucleotide
  modified_base 16: mod_base = OTHER; note = 2'-O-Methyl nucleotide
  modified_base 17: mod_base = OTHER; note = 2'-fluoro nucleotide
  modified_base 18: mod_base = OTHER; note = 2'-O-Methyl nucleotide
  modified_base 19: mod_base = OTHER; note = 2'-fluoro nucleotide
  modified_base 20: mod_base = OTHER; note = deoxy-thymine phosphorothioate
  misc_feature 1..19: note = RNA
  misc_feature 20..21: note = DNA
tgtgatccaagctgtcccatt

SEQ ID NO: 1589 - DNA, 21 bp, synthetic construct
  misc_feature 1..21: note = Description of Artificial Sequence: Synthetic oligonucleotide
  source 1..21: mol_type = other DNA
  modified_base 1: mod_base = OTHER; note = 2'-fluoro nucleotide
  modified_base 2: mod_base = OTHER; note = 2'-fluoro nucleotide
  modified_base 3: mod_base = OTHER; note = 2'-O-Methyl nucleotide
  modified_base 4: mod_base = OTHER; note = 2'-fluoro nucleotide
  modified_base 5: mod_base = OTHER; note = 2'-O-Methyl nucleotide
  modified_base 6: mod_base = OTHER; note = 2'-fluoro nucleotide
  modified_base 7: mod_base = OTHER; note = 2'-O-Methyl nucleotide
  modified_base 8: mod_base = OTHER; note = 2'-fluoro nucleotide
  modified_base 9: mod_base = OTHER; note = 2'-O-Methyl nucleotide
  modified_base 10: mod_base = OTHER; note = 2'-fluoro nucleotide
  modified_base 11: mod_base = OTHER; note = 2'-O-Methyl nucleotide
  modified_base 12: mod_base = OTHER; note = 2'-fluoro nucleotide
  modified_base 13: mod_base = OTHER; note = 2'-O-Methyl nucleotide
  modified_base 14: mod_base = OTHER; note = 2'-fluoro nucleotide
  modified_base 15: mod_base = OTHER; note = 2'-O-Methyl nucleotide
  modified_base 16: mod_base = OTHER; note = 2'-fluoro nucleotide
  modified_base 17: mod_base = OTHER; note = 2'-O-Methyl nucleotide
  modified_base 18: mod_base = OTHER; note = 2'-fluoro nucleotide
  modified_base 19: mod_base = OTHER; note = 2'-O-Methyl nucleotide
  modified_base 20: mod_base = OTHER; note = deoxy-thymine phosphorothioate
  misc_feature 1..19: note = RNA
  misc_feature 20..21: note = DNA
tgggacagcttggatcacatt

SEQ ID NO: 1590 - DNA, 21 bp, synthetic construct
  misc_feature 1..21: note = Description of Artificial Sequence: Synthetic oligonucleotide
  source 1..21: mol_type = other DNA
  modified_base 1: mod_base = OTHER; note = 2'-O-Methyl nucleotide
  modified_base 2: mod_base = OTHER; note = 2'-O-Methyl nucleotide
  modified_base 3: mod_base = OTHER; note = 2'-fluoro nucleotide
  modified_base 4: mod_base = OTHER; note = 2'-O-Methyl nucleotide
  modified_base 5: mod_base = OTHER; note = 2'-fluoro nucleotide
  modified_base 6: mod_base = OTHER; note = 2'-O-Methyl nucleotide
  modified_base 7: mod_base = OTHER; note = 2'-fluoro nucleotide
  modified_base 8: mod_base = OTHER; note = 2'-O-Methyl nucleotide
  modified_base 9: mod_base = OTHER; note = 2'-fluoro nucleotide
  modified_base 10: mod_base = OTHER; note = 2'-O-Methyl nucleotide
  modified_base 11: mod_base = OTHER; note = 2'-fluoro nucleotide
  modified_base 12: mod_base = OTHER; note = 2'-O-Methyl nucleotide
  modified_base 13: mod_base = OTHER; note = 2'-fluoro nucleotide
  modified_base 14: mod_base = OTHER; note = 2'-O-Methyl nucleotide
  modified_base 15: mod_base = OTHER; note = 2'-fluoro nucleotide
  modified_base 16: mod_base = OTHER; note = 2'-O-Methyl nucleotide
  modified_base 17: mod_base = OTHER; note = 2'-fluoro nucleotide
  modified_base 18: mod_base = OTHER; note = 2'-O-Methyl nucleotide
  modified_base 19: mod_base = OTHER; note = 2'-fluoro nucleotide
  modified_base 20: mod_base = OTHER; note = deoxy-thymine phosphorothioate
  misc_feature 1..19: note = RNA
  misc_feature 20..21: note = DNA
gtgatccaagctgtcccaatt

SEQ ID NO: 1591 - DNA, 21 bp, synthetic construct
  misc_feature 1..21: note = Description of Artificial Sequence: Synthetic oligonucleotide
  source 1..21: mol_type = other DNA
  modified_base 1: mod_base = OTHER; note = 2'-fluoro nucleotide
  modified_base 2: mod_base = OTHER; note = 2'-fluoro nucleotide
  modified_base 3: mod_base = OTHER; note = 2'-O-Methyl nucleotide
  modified_base 4: mod_base = OTHER; note = 2'-fluoro nucleotide
  modified_base 5: mod_base = OTHER; note = 2'-O-Methyl nucleotide
  modified_base 6: mod_base = OTHER; note = 2'-fluoro nucleotide
  modified_base 7: mod_base = OTHER; note = 2'-O-Methyl nucleotide
  modified_base 8: mod_base = OTHER; note = 2'-fluoro nucleotide
  modified_base 9: mod_base = OTHER; note = 2'-O-Methyl nucleotide
  modified_base 10: mod_base = OTHER; note = 2'-fluoro nucleotide
  modified_base 11: mod_base = OTHER; note = 2'-O-Methyl nucleotide
  modified_base 12: mod_base = OTHER; note = 2'-fluoro nucleotide
  modified_base 13: mod_base = OTHER; note = 2'-O-Methyl nucleotide
  modified_base 14: mod_base = OTHER; note = 2'-fluoro nucleotide
  modified_base 15: mod_base = OTHER; note = 2'-O-Methyl nucleotide
  modified_base 16: mod_base = OTHER; note = 2'-fluoro nucleotide
  modified_base 17: mod_base = OTHER; note = 2'-O-Methyl nucleotide
  modified_base 18: mod_base = OTHER; note = 2'-fluoro nucleotide
  modified_base 19: mod_base = OTHER; note = 2'-O-Methyl nucleotide
  modified_base 20: mod_base = OTHER; note = deoxy-thymine phosphorothioate
  misc_feature 1..19: note = RNA
  misc_feature 20..21: note = DNA
ttgggacagcttggatcactt

SEQ ID NO: 1592 - DNA, 21 bp, synthetic construct
  misc_feature 1..21: note = Description of Artificial Sequence: Synthetic oligonucleotide
  source 1..21: mol_type = other DNA
  modified_base 1: mod_base = OTHER; note = 2'-O-Methyl nucleotide
  modified_base 2: mod_base = OTHER; note = 2'-O-Methyl nucleotide
  modified_base 3: mod_base = OTHER; note = 2'-fluoro nucleotide
  modified_base 4: mod_base = OTHER; note = 2'-O-Methyl nucleotide
  modified_base 5: mod_base = OTHER; note = 2'-fluoro nucleotide
  modified_base 6: mod_base = OTHER; note = 2'-O-Methyl nucleotide
  modified_base 7: mod_base = OTHER; note = 2'-fluoro nucleotide
  modified_base 8: mod_base = OTHER; note = 2'-O-Methyl nucleotide
  modified_base 9: mod_base = OTHER; note = 2'-fluoro nucleotide
  modified_base 10: mod_base = OTHER; note = 2'-O-Methyl nucleotide
  modified_base 11: mod_base = OTHER; note = 2'-fluoro nucleotide
  modified_base 12: mod_base = OTHER; note = 2'-O-Methyl nucleotide
  modified_base 13: mod_base = OTHER; note = 2'-fluoro nucleotide
  modified_base 14: mod_base = OTHER; note = 2'-O-Methyl nucleotide
  modified_base 15: mod_base = OTHER; note = 2'-fluoro nucleotide
  modified_base 16: mod_base = OTHER; note = 2'-O-Methyl nucleotide
  modified_base 17: mod_base = OTHER; note = 2'-fluoro nucleotide
  modified_base 18: mod_base = OTHER; note = 2'-O-Methyl nucleotide
  modified_base 19: mod_base = OTHER; note = 2'-fluoro nucleotide
  modified_base 20: mod_base = OTHER; note = deoxy-thymine phosphorothioate
  misc_feature 1..19: note = RNA
  misc_feature 20..21: note = DNA
gatccaagctgtcccaatgtt

SEQ ID NO: 1593 - DNA, 21 bp, synthetic construct
  misc_feature 1..21: note = Description of Artificial Sequence: Synthetic oligonucleotide
  source 1..21: mol_type = other DNA
  modified_base 1: mod_base = OTHER; note = 2'-fluoro nucleotide
  modified_base 2: mod_base = OTHER; note = 2'-fluoro nucleotide
  modified_base 3: mod_base = OTHER; note = 2'-O-Methyl nucleotide
  modified_base 4: mod_base = OTHER; note = 2'-fluoro nucleotide
  modified_base 5: mod_base = OTHER; note = 2'-O-Methyl nucleotide
  modified_base 6: mod_base = OTHER; note = 2'-fluoro nucleotide
  modified_base 7: mod_base = OTHER; note = 2'-O-Methyl nucleotide
  modified_base 8: mod_base = OTHER; note = 2'-fluoro nucleotide
  modified_base 9: mod_base = OTHER; note = 2'-O-Methyl nucleotide
  modified_base 10: mod_base = OTHER; note = 2'-fluoro nucleotide
  modified_base 11: mod_base = OTHER; note = 2'-O-Methyl nucleotide
  modified_base 12: mod_base = OTHER; note = 2'-fluoro nucleotide
  modified_base 13: mod_base = OTHER; note = 2'-O-Methyl nucleotide
  modified_base 14: mod_base = OTHER; note = 2'-fluoro nucleotide
  modified_base 15: mod_base = OTHER; note = 2'-O-Methyl nucleotide
  modified_base 16: mod_base = OTHER; note = 2'-fluoro nucleotide
  modified_base 17: mod_base = OTHER; note = 2'-O-Methyl nucleotide
  modified_base 18: mod_base = OTHER; note = 2'-fluoro nucleotide
  modified_base 19: mod_base = OTHER; note = 2'-O-Methyl nucleotide
  modified_base 20: mod_base = OTHER; note = deoxy-thymine phosphorothioate
  misc_feature 1..19: note = RNA
  misc_feature 20..21: note = DNA
cattgggacagcttggatctt

SEQ ID NO: 1594 - DNA, 21 bp, synthetic construct
  misc_feature 1..21: note = Description of Artificial Sequence: Synthetic oligonucleotide
  source 1..21: mol_type = other DNA
  modified_base 1: mod_base = OTHER; note = 2'-O-Methyl nucleotide
  modified_base 2: mod_base = OTHER; note = 2'-O-Methyl nucleotide
  modified_base 3: mod_base = OTHER; note = 2'-fluoro nucleotide
  modified_base 4: mod_base = OTHER; note = 2'-O-Methyl nucleotide
  modified_base 5: mod_base = OTHER; note = 2'-fluoro nucleotide
  modified_base 6: mod_base = OTHER; note = 2'-O-Methyl nucleotide
  modified_base 7: mod_base = OTHER; note = 2'-fluoro nucleotide
  modified_base 8: mod_base = OTHER; note = 2'-O-Methyl nucleotide
  modified_base 9: mod_base = OTHER; note = 2'-fluoro nucleotide
  modified_base 10: mod_base = OTHER; note = 2'-O-Methyl nucleotide
  modified_base 11: mod_base = OTHER; note = 2'-fluoro nucleotide
  modified_base 12: mod_base = OTHER; note = 2'-O-Methyl nucleotide
  modified_base 13: mod_base = OTHER; note = 2'-fluoro nucleotide
  modified_base 14: mod_base = OTHER; note = 2'-O-Methyl nucleotide
  modified_base 15: mod_base = OTHER; note = 2'-fluoro nucleotide
  modified_base 16: mod_base = OTHER; note = 2'-O-Methyl nucleotide
  modified_base 17: mod_base = OTHER; note = 2'-fluoro nucleotide
  modified_base 18: mod_base = OTHER; note = 2'-O-Methyl nucleotide
  modified_base 19: mod_base = OTHER; note = 2'-fluoro nucleotide
  modified_base 20: mod_base = OTHER; note = deoxy-thymine phosphorothioate
  misc_feature 1..19: note = RNA
  misc_feature 20..21: note = DNA
atccaagctgtcccaatggtt

SEQ ID NO: 1595 - DNA, 21 bp, synthetic construct
  misc_feature 1..21: note = Description of Artificial Sequence: Synthetic oligonucleotide
  source 1..21: mol_type = other DNA
  modified_base 1: mod_base = OTHER; note = 2'-fluoro nucleotide
  modified_base 2: mod_base = OTHER; note = 2'-fluoro nucleotide
  modified_base 3: mod_base = OTHER; note = 2'-O-Methyl nucleotide
  modified_base 4: mod_base = OTHER; note = 2'-fluoro nucleotide
  modified_base 5: mod_base = OTHER; note = 2'-O-Methyl nucleotide
  modified_base 6: mod_base = OTHER; note = 2'-fluoro nucleotide
  modified_base 7: mod_base = OTHER; note = 2'-O-Methyl nucleotide
  modified_base 8: mod_base = OTHER; note = 2'-fluoro nucleotide
  modified_base 9: mod_base = OTHER; note = 2'-O-Methyl nucleotide
  modified_base 10: mod_base = OTHER; note = 2'-fluoro nucleotide
  modified_base 11: mod_base = OTHER; note = 2'-O-Methyl nucleotide
  modified_base 12: mod_base = OTHER; note = 2'-fluoro nucleotide
  modified_base 13: mod_base = OTHER; note = 2'-O-Methyl nucleotide
  modified_base 14: mod_base = OTHER; note = 2'-fluoro nucleotide
  modified_base 15: mod_base = OTHER; note = 2'-O-Methyl nucleotide
  modified_base 16: mod_base = OTHER; note = 2'-fluoro nucleotide
  modified_base 17: mod_base = OTHER; note = 2'-O-Methyl nucleotide
  modified_base 18: mod_base = OTHER; note = 2'-fluoro nucleotide
  modified_base 19: mod_base = OTHER; note = 2'-O-Methyl nucleotide
  modified_base 20: mod_base = OTHER; note = deoxy-thymine phosphorothioate
  misc_feature 1..19: note = RNA
  misc_feature 20..21: note = DNA
ccattgggacagcttggattt

SEQ ID NO: 1596 - DNA, 21 bp, synthetic construct
  misc_feature 1..21: note = Description of Artificial Sequence: Synthetic oligonucleotide
  source 1..21: mol_type = other DNA
  modified_base 1: mod_base = OTHER; note = 2'-O-Methyl nucleotide
  modified_base 2: mod_base = OTHER; note = 2'-O-Methyl nucleotide
  modified_base 3: mod_base = OTHER; note = 2'-fluoro nucleotide
  modified_base 4: mod_base = OTHER; note = 2'-O-Methyl nucleotide
  modified_base 5: mod_base = OTHER; note = 2'-fluoro nucleotide
  modified_base 6: mod_base = OTHER; note = 2'-O-Methyl nucleotide
  modified_base 7: mod_base = OTHER; note = 2'-fluoro nucleotide
  modified_base 8: mod_base = OTHER; note = 2'-O-Methyl nucleotide
  modified_base 9: mod_base = OTHER; note = 2'-fluoro nucleotide
  modified_base 10: mod_base = OTHER; note = 2'-O-Methyl nucleotide
  modified_base 11: mod_base = OTHER; note = 2'-fluoro nucleotide
  modified_base 12: mod_base = OTHER; note = 2'-O-Methyl nucleotide
  modified_base 13: mod_base = OTHER; note = 2'-fluoro nucleotide
  modified_base 14: mod_base = OTHER; note = 2'-O-Methyl nucleotide
  modified_base 15: mod_base = OTHER; note = 2'-fluoro nucleotide
  modified_base 16: mod_base = OTHER; note = 2'-O-Methyl nucleotide
  modified_base 17: mod_base = OTHER; note = 2'-fluoro nucleotide
  modified_base 18: mod_base = OTHER; note = 2'-O-Methyl nucleotide
  modified_base 19: mod_base = OTHER; note = 2'-fluoro nucleotide
  modified_base 20: mod_base = OTHER; note = deoxy-thymine phosphorothioate
  misc_feature 1..19: note = RNA
  misc_feature 20..21: note = DNA
tccaagctgtcccaatgggtt

SEQ ID NO: 1597 - DNA, 21 bp, synthetic construct
  misc_feature 1..21: note = Description of Artificial Sequence: Synthetic oligonucleotide
  source 1..21: mol_type = other DNA
  modified_base 1: mod_base = OTHER; note = 2'-fluoro nucleotide
  modified_base 2: mod_base = OTHER; note = 2'-fluoro nucleotide
  modified_base 3: mod_base = OTHER; note = 2'-O-Methyl nucleotide
  modified_base 4: mod_base = OTHER; note = 2'-fluoro nucleotide
  modified_base 5: mod_base = OTHER; note = 2'-O-Methyl nucleotide
  modified_base 6: mod_base = OTHER; note = 2'-fluoro nucleotide
  modified_base 7: mod_base = OTHER; note = 2'-O-Methyl nucleotide
  modified_base 8: mod_base = OTHER; note = 2'-fluoro nucleotide
  modified_base 9: mod_base = OTHER; note = 2'-O-Methyl nucleotide
  modified_base 10: mod_base = OTHER; note = 2'-fluoro nucleotide
  modified_base 11: mod_base = OTHER; note = 2'-O-Methyl nucleotide
  modified_base 12: mod_base = OTHER; note = 2'-fluoro nucleotide
  modified_base 13: mod_base = OTHER; note = 2'-O-Methyl nucleotide
  modified_base 14: mod_base = OTHER; note = 2'-fluoro nucleotide
  modified_base 15: mod_base = OTHER; note = 2'-O-Methyl nucleotide
  modified_base 16: mod_base = OTHER; note = 2'-fluoro nucleotide
  modified_base 17: mod_base = OTHER; note = 2'-O-Methyl nucleotide
  modified_base 18: mod_base = OTHER; note = 2'-fluoro nucleotide
  modified_base 19: mod_base = OTHER; note = 2'-O-Methyl nucleotide
  modified_base 20: mod_base = OTHER; note = deoxy-thymine phosphorothioate
  misc_feature 1..19: note = RNA
  misc_feature 20..21: note = DNA
cccattgggacagcttggatt

SEQ ID NO: 1598 - DNA, 21 bp, synthetic construct
  misc_feature 1..21: note = Description of Artificial Sequence: Synthetic oligonucleotide
  source 1..21: mol_type = other DNA
  modified_base 1: mod_base = OTHER; note = 2'-O-Methyl nucleotide
  modified_base 2: mod_base = OTHER; note = 2'-O-Methyl nucleotide
  modified_base 3: mod_base = OTHER; note = 2'-fluoro nucleotide
  modified_base 4: mod_base = OTHER; note = 2'-O-Methyl nucleotide
  modified_base 5: mod_base = OTHER; note = 2'-fluoro nucleotide
  modified_base 6: mod_base = OTHER; note = 2'-O-Methyl nucleotide
  modified_base 7: mod_base = OTHER; note = 2'-fluoro nucleotide
  modified_base 8: mod_base = OTHER; note = 2'-O-Methyl nucleotide
  modified_base 9: mod_base = OTHER; note = 2'-fluoro nucleotide
  modified_base 10: mod_base = OTHER; note = 2'-O-Methyl nucleotide
  modified_base 11: mod_base = OTHER; note = 2'-fluoro nucleotide
  modified_base 12: mod_base = OTHER; note = 2'-O-Methyl nucleotide
  modified_base 13: mod_base = OTHER; note = 2'-fluoro nucleotide
  modified_base 14: mod_base = OTHER; note = 2'-O-Methyl nucleotide
  modified_base 15: mod_base = OTHER; note = 2'-fluoro nucleotide
  modified_base 16: mod_base = OTHER; note = 2'-O-Methyl nucleotide
  modified_base 17: mod_base = OTHER; note = 2'-fluoro nucleotide
  modified_base 18: mod_base = OTHER; note = 2'-O-Methyl nucleotide
  modified_base 19: mod_base = OTHER; note = 2'-fluoro nucleotide
  modified_base 20: mod_base = OTHER; note = deoxy-thymine phosphorothioate
  misc_feature 1..19: note = RNA
  misc_feature 20..21: note = DNA
ccaagctgtcccaatgggatt

SEQ ID NO: 1599 - DNA, 21 bp, synthetic construct
  misc_feature 1..21: note = Description of Artificial Sequence: Synthetic oligonucleotide
  source 1..21: mol_type = other DNA
  modified_base 1: mod_base = OTHER; note = 2'-fluoro nucleotide
  modified_base 2: mod_base = OTHER; note = 2'-fluoro nucleotide
  modified_base 3: mod_base = OTHER; note = 2'-O-Methyl nucleotide
  modified_base 4: mod_base = OTHER; note = 2'-fluoro nucleotide
  modified_base 5: mod_base = OTHER; note = 2'-O-Methyl nucleotide
  modified_base 6: mod_base = OTHER; note = 2'-fluoro nucleotide
  modified_base 7: mod_base = OTHER; note = 2'-O-Methyl nucleotide
  modified_base 8: mod_base = OTHER; note = 2'-fluoro nucleotide
  modified_base 9: mod_base = OTHER; note = 2'-O-Methyl nucleotide
  modified_base 10: mod_base = OTHER; note = 2'-fluoro nucleotide
  modified_base 11: mod_base = OTHER; note = 2'-O-Methyl nucleotide
  modified_base 12: mod_base = OTHER; note = 2'-fluoro nucleotide
  modified_base 13: mod_base = OTHER; note = 2'-O-Methyl nucleotide
  modified_base 14: mod_base = OTHER; note = 2'-fluoro nucleotide
  modified_base 15: mod_base = OTHER; note = 2'-O-Methyl nucleotide
  modified_base 16: mod_base = OTHER; note = 2'-fluoro nucleotide
  modified_base 17: mod_base = OTHER; note = 2'-O-Methyl nucleotide
  modified_base 18: mod_base = OTHER; note = 2'-fluoro nucleotide
  modified_base 19: mod_base = OTHER; note = 2'-O-Methyl nucleotide
  modified_base 20: mod_base = OTHER; note = deoxy-thymine phosphorothioate
  misc_feature 1..19: note = RNA
  misc_feature 20..21: note = DNA
tcccattgggacagcttggtt

SEQ ID NO: 1600 - DNA, 21 bp, synthetic construct
  misc_feature 1..21: note = Description of Artificial Sequence: Synthetic oligonucleotide
  source 1..21: mol_type = other DNA
  modified_base 1: mod_base = OTHER; note = 2'-O-Methyl nucleotide
  modified_base 2: mod_base = OTHER; note = 2'-O-Methyl nucleotide
  modified_base 3: mod_base = OTHER; note = 2'-fluoro nucleotide
  modified_base 4: mod_base = OTHER; note = 2'-O-Methyl nucleotide
  modified_base 5: mod_base = OTHER; note = 2'-fluoro nucleotide
  modified_base 6: mod_base = OTHER; note = 2'-O-Methyl nucleotide
  modified_base 7: mod_base = OTHER; note = 2'-fluoro nucleotide
  modified_base 8: mod_base = OTHER; note = 2'-O-Methyl nucleotide
  modified_base 9: mod_base = OTHER; note = 2'-fluoro nucleotide
  modified_base 10: mod_base = OTHER; note = 2'-O-Methyl nucleotide
  modified_base 11: mod_base = OTHER; note = 2'-fluoro nucleotide
  modified_base 12: mod_base = OTHER; note = 2'-O-Methyl nucleotide
  modified_base 13: mod_base = OTHER; note = 2'-fluoro nucleotide
  modified_base 14: mod_base = OTHER; note = 2'-O-Methyl nucleotide
  modified_base 15: mod_base = OTHER; note = 2'-fluoro nucleotide
  modified_base 16: mod_base = OTHER; note = 2'-O-Methyl nucleotide
  modified_base 17: mod_base = OTHER; note = 2'-fluoro nucleotide
  modified_base 18: mod_base = OTHER; note = 2'-O-Methyl nucleotide
  modified_base 19: mod_base = OTHER; note = 2'-fluoro nucleotide
  modified_base 20: mod_base = OTHER; note = deoxy-thymine phosphorothioate
  misc_feature 1..19: note = RNA
  misc_feature 20..21: note = DNA
caagctgtcccaatgggagtt

SEQ ID NO: 1601 - DNA, 21 bp, synthetic construct
  misc_feature 1..21: note = Description of Artificial Sequence: Synthetic oligonucleotide
  source 1..21: mol_type = other DNA
  modified_base 1: mod_base = OTHER; note = 2'-fluoro nucleotide
  modified_base 2: mod_base = OTHER; note = 2'-fluoro nucleotide
  modified_base 3: mod_base = OTHER; note = 2'-O-Methyl nucleotide
  modified_base 4: mod_base = OTHER; note = 2'-fluoro nucleotide
  modified_base 5: mod_base = OTHER; note = 2'-O-Methyl nucleotide
  modified_base 6: mod_base = OTHER; note = 2'-fluoro nucleotide
  modified_base 7: mod_base = OTHER; note = 2'-O-Methyl nucleotide
  modified_base 8: mod_base = OTHER; note = 2'-fluoro nucleotide
  modified_base 9: mod_base = OTHER; note = 2'-O-Methyl nucleotide
  modified_base 10: mod_base = OTHER; note = 2'-fluoro nucleotide
  modified_base 11: mod_base = OTHER; note = 2'-O-Methyl nucleotide
  modified_base 12: mod_base = OTHER; note = 2'-fluoro nucleotide
  modified_base 13: mod_base = OTHER; note = 2'-O-Methyl nucleotide
  modified_base 14: mod_base = OTHER; note = 2'-fluoro nucleotide
  modified_base 15: mod_base = OTHER; note = 2'-O-Methyl nucleotide
  modified_base 16: mod_base = OTHER; note = 2'-fluoro nucleotide
  modified_base 17: mod_base = OTHER; note = 2'-O-Methyl nucleotide
  modified_base 18: mod_base = OTHER; note = 2'-fluoro nucleotide
  modified_base 19: mod_base = OTHER; note = 2'-O-Methyl nucleotide
  modified_base 20: mod_base = OTHER; note = deoxy-thymine phosphorothioate
  misc_feature 1..19: note = RNA
  misc_feature 20..21: note = DNA
ctcccattgggacagcttgtt

SEQ ID NO: 1602 - DNA, 21 bp, synthetic construct
  misc_feature 1..21: note = Description of Artificial Sequence: Synthetic oligonucleotide
  source 1..21: mol_type = other DNA
  modified_base 1: mod_base = OTHER; note = 2'-O-Methyl nucleotide
  modified_base 2: mod_base = OTHER; note = 2'-O-Methyl nucleotide
  modified_base 3: mod_base = OTHER; note = 2'-fluoro nucleotide
  modified_base 4: mod_base = OTHER; note = 2'-O-Methyl nucleotide
  modified_base 5: mod_base = OTHER; note = 2'-fluoro nucleotide
  modified_base 6: mod_base = OTHER; note = 2'-O-Methyl nucleotide
  modified_base 7: mod_base = OTHER; note = 2'-fluoro nucleotide
  modified_base 8: mod_base = OTHER; note = 2'-O-Methyl nucleotide
  modified_base 9: mod_base = OTHER; note = 2'-fluoro nucleotide
  modified_base 10: mod_base = OTHER; note = 2'-O-Methyl nucleotide
  modified_base 11: mod_base = OTHER; note = 2'-fluoro nucleotide
  modified_base 12: mod_base = OTHER; note = 2'-O-Methyl nucleotide
  modified_base 13: mod_base = OTHER; note = 2'-fluoro nucleotide
  modified_base 14: mod_base = OTHER; note = 2'-O-Methyl nucleotide
  modified_base 15: mod_base = OTHER; note = 2'-fluoro nucleotide
  modified_base 16: mod_base = OTHER; note = 2'-O-Methyl nucleotide
  modified_base 17: mod_base = OTHER; note = 2'-fluoro nucleotide
  modified_base 18: mod_base = OTHER; note = 2'-O-Methyl nucleotide
  modified_base 19: mod_base = OTHER; note = 2'-fluoro nucleotide
  modified_base 20: mod_base = OTHER; note = deoxy-thymine phosphorothioate
  misc_feature 1..19: note = RNA
  misc_feature 20..21: note = DNA
agctgtcccaatgggagcttt

SEQ ID NO: 1603 - DNA, 21 bp, synthetic construct
  misc_feature 1..21: note = Description of Artificial Sequence: Synthetic oligonucleotide
  source 1..21: mol_type = other DNA
  modified_base 1: mod_base = OTHER; note = 2'-fluoro nucleotide
  modified_base 2: mod_base = OTHER; note = 2'-fluoro nucleotide
  modified_base 3: mod_base = OTHER; note = 2'-O-Methyl nucleotide
  modified_base 4: mod_base = OTHER; note = 2'-fluoro nucleotide
  modified_base 5: mod_base = OTHER; note = 2'-O-Methyl nucleotide
  modified_base 6: mod_base = OTHER; note = 2'-fluoro nucleotide
  modified_base 7: mod_base = OTHER; note = 2'-O-Methyl nucleotide
  modified_base 8: mod_base = OTHER; note = 2'-fluoro nucleotide
  modified_base 9: mod_base = OTHER; note = 2'-O-Methyl nucleotide
  modified_base 10: mod_base = OTHER; note = 2'-fluoro nucleotide
  modified_base 11: mod_base = OTHER; note = 2'-O-Methyl nucleotide
  modified_base 12: mod_base = OTHER; note = 2'-fluoro nucleotide
  modified_base 13: mod_base = OTHER; note = 2'-O-Methyl nucleotide
  modified_base 14: mod_base = OTHER; note = 2'-fluoro nucleotide
  modified_base 15: mod_base = OTHER; note = 2'-O-Methyl nucleotide
  modified_base 16: mod_base = OTHER; note = 2'-fluoro nucleotide
  modified_base 17: mod_base = OTHER; note = 2'-O-Methyl nucleotide
  modified_base 18: mod_base = OTHER; note = 2'-fluoro nucleotide
  modified_base 19: mod_base = OTHER; note = 2'-O-Methyl nucleotide
  modified_base 20: mod_base = OTHER; note = deoxy-thymine phosphorothioate
  misc_feature 1..19: note = RNA
  misc_feature 20..21: note = DNA
agctcccattgggacagcttt

SEQ ID NO: 1604 - DNA, 21 bp, synthetic construct
  misc_feature 1..21: note = Description of Artificial Sequence: Synthetic oligonucleotide
  source 1..21: mol_type = other DNA
  modified_base 1: mod_base = OTHER; note = 2'-O-Methyl nucleotide
  modified_base 2: mod_base = OTHER; note = 2'-O-Methyl nucleotide
  modified_base 3: mod_base = OTHER; note = 2'-fluoro nucleotide
  modified_base 4: mod_base = OTHER; note = 2'-O-Methyl nucleotide
  modified_base 5: mod_base = OTHER; note = 2'-fluoro nucleotide
  modified_base 6: mod_base = OTHER; note = 2'-O-Methyl nucleotide
  modified_base 7: mod_base = OTHER; note = 2'-fluoro nucleotide
  modified_base 8: mod_base = OTHER; note = 2'-O-Methyl nucleotide
  modified_base 9: mod_base = OTHER; note = 2'-fluoro nucleotide
  modified_base 10: mod_base = OTHER; note = 2'-O-Methyl nucleotide
  modified_base 11: mod_base = OTHER; note = 2'-fluoro nucleotide
  modified_base 12: mod_base = OTHER; note = 2'-O-Methyl nucleotide
  modified_base 13: mod_base = OTHER; note = 2'-fluoro nucleotide
  modified_base 14: mod_base = OTHER; note = 2'-O-Methyl nucleotide
  modified_base 15: mod_base = OTHER; note = 2'-fluoro nucleotide
  modified_base 16: mod_base = OTHER; note = 2'-O-Methyl nucleotide
  modified_base 17: mod_base = OTHER; note = 2'-fluoro nucleotide
  modified_base 18: mod_base = OTHER; note = 2'-O-Methyl nucleotide
  modified_base 19: mod_base = OTHER; note = 2'-fluoro nucleotide
  modified_base 20: mod_base = OTHER; note = deoxy-thymine phosphorothioate
  misc_feature 1..19: note = RNA
  misc_feature 20..21: note = DNA
tgtcccaatgggagctgcttt

SEQ ID NO: 1605 - DNA, 21 bp, synthetic construct
  misc_feature 1..21: note = Description of Artificial Sequence: Synthetic oligonucleotide
  source 1..21: mol_type = other DNA
  modified_base 1: mod_base = OTHER; note = 2'-fluoro nucleotide
  modified_base 2: mod_base = OTHER; note = 2'-fluoro nucleotide
  modified_base 3: mod_base = OTHER; note = 2'-O-Methyl nucleotide
  modified_base 4: mod_base = OTHER; note = 2'-fluoro nucleotide
  modified_base 5: mod_base = OTHER; note = 2'-O-Methyl nucleotide
  modified_base 6: mod_base = OTHER; note = 2'-fluoro nucleotide
  modified_base 7: mod_base = OTHER; note = 2'-O-Methyl nucleotide
  modified_base 8: mod_base = OTHER; note = 2'-fluoro nucleotide
  modified_base 9: mod_base = OTHER; note = 2'-O-Methyl nucleotide
  modified_base 10: mod_base = OTHER; note = 2'-fluoro nucleotide
  modified_base 11: mod_base = OTHER; note = 2'-O-Methyl nucleotide
  modified_base 12: mod_base = OTHER; note = 2'-fluoro nucleotide
  modified_base 13: mod_base = OTHER; note = 2'-O-Methyl nucleotide
  modified_base 14: mod_base = OTHER; note = 2'-fluoro nucleotide
  modified_base 15: mod_base = OTHER; note = 2'-O-Methyl nucleotide
  modified_base 16: mod_base = OTHER; note = 2'-fluoro nucleotide
  modified_base 17: mod_base = OTHER; note = 2'-O-Methyl nucleotide
  modified_base 18: mod_base = OTHER; note = 2'-fluoro nucleotide
  modified_base 19: mod_base = OTHER; note = 2'-O-Methyl nucleotide
  modified_base 20: mod_base = OTHER; note = deoxy-thymine phosphorothioate
  misc_feature 1..19: note = RNA
  misc_feature 20..21: note = DNA
agcagctcccattgggacatt

SEQ ID NO: 1606 - DNA, 21 bp, synthetic construct
  misc_feature 1..21: note = Description of Artificial Sequence: Synthetic oligonucleotide
  source 1..21: mol_type = other DNA
  modified_base 1: mod_base = OTHER; note = 2'-O-Methyl nucleotide
  modified_base 2: mod_base = OTHER; note = 2'-O-Methyl nucleotide
  modified_base 3: mod_base = OTHER; note = 2'-fluoro nucleotide
  modified_base 4: mod_base = OTHER; note = 2'-O-Methyl nucleotide
  modified_base 5: mod_base = OTHER; note = 2'-fluoro nucleotide
  modified_base 6: mod_base = OTHER; note = 2'-O-Methyl nucleotide
  modified_base 7: mod_base = OTHER; note = 2'-fluoro nucleotide
  modified_base 8: mod_base = OTHER; note = 2'-O-Methyl nucleotide
  modified_base 9: mod_base = OTHER; note = 2'-fluoro nucleotide
  modified_base 10: mod_base = OTHER; note = 2'-O-Methyl nucleotide
  modified_base 11: mod_base = OTHER; note = 2'-fluoro nucleotide
  modified_base 12: mod_base = OTHER; note = 2'-O-Methyl nucleotide
  modified_base 13: mod_base = OTHER; note = 2'-fluoro nucleotide
  modified_base 14: mod_base = OTHER; note = 2'-O-Methyl nucleotide
  modified_base 15: mod_base = OTHER; note = 2'-fluoro nucleotide
  modified_base 16: mod_base = OTHER; note = 2'-O-Methyl nucleotide
  modified_base 17: mod_base = OTHER; note = 2'-fluoro nucleotide
  modified_base 18: mod_base = OTHER; note = 2'-O-Methyl nucleotide
  modified_base 19: mod_base = OTHER; note = 2'-fluoro nucleotide
  modified_base 20: mod_base = OTHER; note = deoxy-thymine phosphorothioate
  misc_feature 1..19: note = RNA
  misc_feature 20..21: note = DNA
ggtgcaggagaggagaacttt

SEQ ID NO: 1607 - DNA, 21 bp, synthetic construct
  misc_feature 1..21: note = Description of Artificial Sequence: Synthetic oligonucleotide
  source 1..21: mol_type = other DNA
  modified_base 1: mod_base = OTHER; note = 2'-fluoro nucleotide
  modified_base 2: mod_base = OTHER; note = 2'-fluoro nucleotide
  modified_base 3: mod_base = OTHER; note = 2'-O-Methyl nucleotide
  modified_base 4: mod_base = OTHER; note = 2'-fluoro nucleotide
  modified_base 5: mod_base = OTHER; note = 2'-O-Methyl nucleotide
  modified_base 6: mod_base = OTHER; note = 2'-fluoro nucleotide
  modified_base 7: mod_base = OTHER; note = 2'-O-Methyl nucleotide
  modified_base 8: mod_base = OTHER; note = 2'-fluoro nucleotide
  modified_base 9: mod_base = OTHER; note = 2'-O-Methyl nucleotide
  modified_base 10: mod_base = OTHER; note = 2'-fluoro nucleotide
  modified_base 11: mod_base = OTHER; note = 2'-O-Methyl nucleotide
  modified_base 12: mod_base = OTHER; note = 2'-fluoro nucleotide
  modified_base 13: mod_base = OTHER; note = 2'-O-Methyl nucleotide
  modified_base 14: mod_base = OTHER; note = 2'-fluoro nucleotide
  modified_base 15: mod_base = OTHER; note = 2'-O-Methyl nucleotide
  modified_base 16: mod_base = OTHER; note = 2'-fluoro nucleotide
  modified_base 17: mod_base = OTHER; note = 2'-O-Methyl nucleotide
  modified_base 18: mod_base = OTHER; note = 2'-fluoro nucleotide
  modified_base 19: mod_base = OTHER; note = 2'-O-Methyl nucleotide
  modified_base 20: mod_base = OTHER; note = deoxy-thymine phosphorothioate
  misc_feature 1..19: note = RNA
  misc_feature 20..21: note = DNA
agttctcctctcctgcacctt

SEQ ID NO: 1608 - DNA, 21 bp, synthetic construct
  misc_feature 1..21: note = Description of Artificial Sequence: Synthetic oligonucleotide
  source 1..21: mol_type = other DNA
  modified_base 1: mod_base = OTHER; note = 2'-O-Methyl nucleotide
  modified_base 2: mod_base = OTHER; note = 2'-O-Methyl nucleotide
  modified_base 3: mod_base = OTHER; note = 2'-fluoro nucleotide
  modified_base 4: mod_base = OTHER; note = 2'-O-Methyl nucleotide
  modified_base 5: mod_base = OTHER; note = 2'-fluoro nucleotide
  modified_base 6: mod_base = OTHER; note = 2'-O-Methyl nucleotide
  modified_base 7: mod_base = OTHER; note = 2'-fluoro nucleotide
  modified_base 8: mod_base = OTHER; note = 2'-O-Methyl nucleotide
  modified_base 9: mod_base = OTHER; note = 2'-fluoro nucleotide
  modified_base 10: mod_base = OTHER; note = 2'-O-Methyl nucleotide
  modified_base 11: mod_base = OTHER; note = 2'-fluoro nucleotide
  modified_base 12: mod_base = OTHER; note = 2'-O-Methyl nucleotide
  modified_base 13: mod_base = OTHER; note = 2'-fluoro nucleotide
  modified_base 14: mod_base = OTHER; note = 2'-O-Methyl nucleotide
  modified_base 15: mod_base = OTHER; note = 2'-fluoro nucleotide
  modified_base 16: mod_base = OTHER; note = 2'-O-Methyl nucleotide
  modified_base 17: mod_base = OTHER; note = 2'-fluoro nucleotide
  modified_base 18: mod_base = OTHER; note = 2'-O-Methyl nucleotide
  modified_base 19: mod_base = OTHER; note = 2'-fluoro nucleotide
  modified_base 20: mod_base = OTHER; note = deoxy-thymine phosphorothioate
  misc_feature 1..19: note = RNA
  misc_feature 20..21: note = DNA
aaactgaccaaaatcatcttt

SEQ ID NO: 1609 - DNA, 21 bp, synthetic construct
  misc_feature 1..21: note = Description of Artificial Sequence: Synthetic oligonucleotide
  source 1..21: mol_type = other DNA
  modified_base 1: mod_base = OTHER; note = 2'-fluoro nucleotide
  modified_base 2: mod_base = OTHER; note = 2'-fluoro nucleotide
  modified_base 3: mod_base = OTHER; note = 2'-O-Methyl nucleotide
  modified_base 4: mod_base = OTHER; note = 2'-fluoro nucleotide
  modified_base 5: mod_base = OTHER; note = 2'-O-Methyl nucleotide
  modified_base 6: mod_base = OTHER; note = 2'-fluoro nucleotide
  modified_base 7: mod_base = OTHER; note = 2'-O-Methyl nucleotide
  modified_base 8: mod_base = OTHER; note = 2'-fluoro nucleotide
  modified_base 9: mod_base = OTHER; note = 2'-O-Methyl nucleotide
  modified_base 10: mod_base = OTHER; note = 2'-fluoro nucleotide
  modified_base 11: mod_base = OTHER; note = 2'-O-Methyl nucleotide
  modified_base 12: mod_base = OTHER; note = 2'-fluoro nucleotide
  modified_base 13: mod_base = OTHER; note = 2'-O-Methyl nucleotide
  modified_base 14: mod_base = OTHER; note = 2'-fluoro nucleotide
  modified_base 15: mod_base = OTHER; note = 2'-O-Methyl nucleotide
  modified_base 16: mod_base = OTHER; note = 2'-fluoro nucleotide
  modified_base 17: mod_base = OTHER; note = 2'-O-Methyl nucleotide
  modified_base 18: mod_base = OTHER; note = 2'-fluoro nucleotide
  modified_base 19: mod_base = OTHER; note = 2'-O-Methyl nucleotide
  modified_base 20: mod_base = OTHER; note = deoxy-thymine phosphorothioate
  misc_feature 1..19: note = RNA
  misc_feature 20..21: note = DNA
agatgattttggtcagttttt

SEQ ID NO: 1610 - DNA, 21 bp, synthetic construct
  misc_feature 1..21: note = Description of Artificial Sequence: Synthetic oligonucleotide
  source 1..21: mol_type = other DNA
  modified_base 1: mod_base = OTHER; note = 2'-O-Methyl nucleotide
  modified_base 2: mod_base = OTHER; note = 2'-O-Methyl nucleotide
  modified_base 3: mod_base = OTHER; note = 2'-fluoro nucleotide
  modified_base 4: mod_base = OTHER; note = 2'-O-Methyl nucleotide
  modified_base 5: mod_base = OTHER; note = 2'-fluoro nucleotide
  modified_base 6: mod_base = OTHER; note = 2'-O-Methyl nucleotide
  modified_base 7: mod_base = OTHER; note = 2'-fluoro nucleotide
  modified_base 8: mod_base = OTHER; note = 2'-O-Methyl nucleotide
  modified_base 9: mod_base = OTHER; note = 2'-fluoro nucleotide
  modified_base 10: mod_base = OTHER; note = 2'-O-Methyl nucleotide
  modified_base 11: mod_base = OTHER; note = 2'-fluoro nucleotide
  modified_base 12: mod_base = OTHER; note = 2'-O-Methyl nucleotide
  modified_base 13: mod_base = OTHER; note = 2'-fluoro nucleotide
  modified_base 14: mod_base = OTHER; note = 2'-O-Methyl nucleotide
  modified_base 15: mod_base = OTHER; note = 2'-fluoro nucleotide
  modified_base 16: mod_base = OTHER; note = 2'-O-Methyl nucleotide
  modified_base 17: mod_base = OTHER; note = 2'-fluoro nucleotide
  modified_base 18: mod_base = OTHER; note = 2'-O-Methyl nucleotide
  modified_base 19: mod_base = OTHER; note = 2'-fluoro nucleotide
  modified_base 20: mod_base = OTHER; note = deoxy-thymine phosphorothioate
  misc_feature 1..19: note = RNA
  misc_feature 20..21: note = DNA
aactgaccaaaatcatctgtt

SEQ ID NO: 1611 - DNA, 21 bp, synthetic construct
  misc_feature 1..21: note = Description of Artificial Sequence: Synthetic oligonucleotide
  source 1..21: mol_type = other DNA
  modified_base 1: mod_base = OTHER; note = 2'-fluoro nucleotide
  modified_base 2: mod_base = OTHER; note = 2'-fluoro nucleotide
  modified_base 3: mod_base = OTHER; note = 2'-O-Methyl nucleotide
  modified_base 4: mod_base = OTHER; note = 2'-fluoro nucleotide
  modified_base 5: mod_base = OTHER; note = 2'-O-Methyl nucleotide
  modified_base 6: mod_base = OTHER; note = 2'-fluoro nucleotide
  modified_base 7: mod_base = OTHER; note = 2'-O-Methyl nucleotide
  modified_base 8: mod_base = OTHER; note = 2'-fluoro nucleotide
  modified_base 9: mod_base = OTHER; note = 2'-O-Methyl nucleotide
  modified_base 10: mod_base = OTHER; note = 2'-fluoro nucleotide
  modified_base 11: mod_base = OTHER; note = 2'-O-Methyl nucleotide
  modified_base 12: mod_base = OTHER; note = 2'-fluoro nucleotide
  modified_base 13: mod_base = OTHER; note = 2'-O-Methyl nucleotide
  modified_base 14: mod_base = OTHER; note = 2'-fluoro nucleotide
  modified_base 15: mod_base = OTHER; note = 2'-O-Methyl nucleotide
  modified_base 16: mod_base = OTHER; note = 2'-fluoro nucleotide
  modified_base 17: mod_base = OTHER; note = 2'-O-Methyl nucleotide
  modified_base 18: mod_base = OTHER; note = 2'-fluoro nucleotide
  modified_base 19: mod_base = OTHER; note = 2'-O-Methyl nucleotide
  modified_base 20: mod_base = OTHER; note = deoxy-thymine phosphorothioate
  misc_feature 1..19: note = RNA
  misc_feature 20..21: note = DNA
cagatgattttggtcagtttt

SEQ ID NO: 1612 - DNA, 21 bp, synthetic construct
  misc_feature 1..21: note = Description of Artificial Sequence: Synthetic oligonucleotide
  source 1..21: mol_type = other DNA
  modified_base 1: mod_base = OTHER; note = 2'-O-Methyl nucleotide
  modified_base 2: mod_base = OTHER; note = 2'-O-Methyl nucleotide
  modified_base 3: mod_base = OTHER; note = 2'-fluoro nucleotide
  modified_base 4: mod_base = OTHER; note = 2'-O-Methyl nucleotide
  modified_base 5: mod_base = OTHER; note = 2'-fluoro nucleotide
  modified_base 6: mod_base = OTHER; note = 2'-O-Methyl nucleotide
  modified_base 7: mod_base = OTHER; note = 2'-fluoro nucleotide
  modified_base 8: mod_base = OTHER; note = 2'-O-Methyl nucleotide
  modified_base 9: mod_base = OTHER; note = 2'-fluoro nucleotide
  modified_base 10: mod_base = OTHER; note = 2'-O-Methyl nucleotide
  modified_base 11: mod_base = OTHER; note = 2'-fluoro nucleotide
  modified_base 12: mod_base = OTHER; note = 2'-O-Methyl nucleotide
  modified_base 13: mod_base = OTHER; note = 2'-fluoro nucleotide
  modified_base 14: mod_base = OTHER; note = 2'-O-Methyl nucleotide
  modified_base 15: mod_base = OTHER; note = 2'-fluoro nucleotide
  modified_base 16: mod_base = OTHER; note = 2'-O-Methyl nucleotide
  modified_base 17: mod_base = OTHER; note = 2'-fluoro nucleotide
  modified_base 18: mod_base = OTHER; note = 2'-O-Methyl nucleotide
  modified_base 19: mod_base = OTHER; note = 2'-fluoro nucleotide
  modified_base 20: mod_base = OTHER; note = deoxy-thymine phosphorothioate
  misc_feature 1..19: note = RNA
  misc_feature 20..21: note = DNA
actgaccaaaatcatctgttt

SEQ ID NO: 1613 - DNA, 21 bp, synthetic construct
  misc_feature 1..21: note = Description of Artificial Sequence: Synthetic oligonucleotide
  source 1..21: mol_type = other DNA
  modified_base 1: mod_base = OTHER; note = 2'-fluoro nucleotide
  modified_base 2: mod_base = OTHER; note = 2'-fluoro nucleotide
  modified_base 3: mod_base = OTHER; note = 2'-O-Methyl nucleotide
  modified_base 4: mod_base = OTHER; note = 2'-fluoro nucleotide
  modified_base 5: mod_base = OTHER; note = 2'-O-Methyl nucleotide
  modified_base 6: mod_base = OTHER; note = 2'-fluoro nucleotide
  modified_base 7: mod_base = OTHER; note = 2'-O-Methyl nucleotide
  modified_base 8: mod_base = OTHER; note = 2'-fluoro nucleotide
  modified_base 9: mod_base = OTHER; note = 2'-O-Methyl nucleotide
  modified_base 10: mod_base = OTHER; note = 2'-fluoro nucleotide
  modified_base 11: mod_base = OTHER; note = 2'-O-Methyl nucleotide
  modified_base 12: mod_base = OTHER; note = 2'-fluoro nucleotide
  modified_base 13: mod_base = OTHER; note = 2'-O-Methyl nucleotide
  modified_base 14: mod_base = OTHER; note = 2'-fluoro nucleotide
  modified_base 15: mod_base = OTHER; note = 2'-O-Methyl nucleotide
  modified_base 16: mod_base = OTHER; note = 2'-fluoro nucleotide
  modified_base 17: mod_base = OTHER; note = 2'-O-Methyl nucleotide
  modified_base 18: mod_base = OTHER; note = 2'-fluoro nucleotide
  modified_base 19: mod_base = OTHER; note = 2'-O-Methyl nucleotide
  modified_base 20: mod_base = OTHER; note = deoxy-thymine phosphorothioate
  misc_feature 1..19: note = RNA
  misc_feature 20..21: note = DNA
acagatgattttggtcagttt

SEQ ID NO: 1614 - DNA, 21 bp, synthetic construct
  misc_feature 1..21: note = Description of Artificial Sequence: Synthetic oligonucleotide
  source 1..21: mol_type = other DNA
  modified_base 1: mod_base = OTHER; note = 2'-O-Methyl nucleotide
  modified_base 2: mod_base = OTHER; note = 2'-O-Methyl nucleotide
  modified_base 3: mod_base = OTHER; note = 2'-fluoro nucleotide
  modified_base 4: mod_base = OTHER; note = 2'-O-Methyl nucleotide
  modified_base 5: mod_base = OTHER; note = 2'-fluoro nucleotide
  modified_base 6: mod_base = OTHER; note = 2'-O-Methyl nucleotide
  modified_base 7: mod_base = OTHER; note = 2'-fluoro nucleotide
  modified_base 8: mod_base = OTHER; note = 2'-O-Methyl nucleotide
  modified_base 9: mod_base = OTHER; note = 2'-fluoro nucleotide
  modified_base 10: mod_base = OTHER; note = 2'-O-Methyl nucleotide
  modified_base 11: mod_base = OTHER; note = 2'-fluoro nucleotide
  modified_base 12: mod_base = OTHER; note = 2'-O-Methyl nucleotide
  modified_base 13: mod_base = OTHER; note = 2'-fluoro nucleotide
  modified_base 14: mod_base = OTHER; note = 2'-O-Methyl nucleotide
  modified_base 15: mod_base = OTHER; note = 2'-fluoro nucleotide
  modified_base 16: mod_base = OTHER; note = 2'-O-Methyl nucleotide
  modified_base 17: mod_base = OTHER; note = 2'-fluoro nucleotide
  modified_base 18: mod_base = OTHER; note = 2'-O-Methyl nucleotide
  modified_base 19: mod_base = OTHER; note = 2'-fluoro nucleotide
  modified_base 20: mod_base = OTHER; note = deoxy-thymine phosphorothioate
  misc_feature 1..19: note = RNA
  misc_feature 20..21: note = DNA
accaaaatcatctgtgccctt

SEQ ID NO: 1615 - DNA, 21 bp, synthetic construct
  misc_feature 1..21: note = Description of Artificial Sequence: Synthetic oligonucleotide
  source 1..21: mol_type = other DNA
  modified_base 1: mod_base = OTHER; note = 2'-fluoro nucleotide
  modified_base 2: mod_base = OTHER; note = 2'-fluoro nucleotide
  modified_base 3: mod_base = OTHER; note = 2'-O-Methyl nucleotide
  modified_base 4: mod_base = OTHER; note = 2'-fluoro nucleotide
  modified_base 5: mod_base = OTHER; note = 2'-O-Methyl nucleotide
  modified_base 6: mod_base = OTHER; note = 2'-fluoro nucleotide
  modified_base 7: mod_base = OTHER; note = 2'-O-Methyl nucleotide
  modified_base 8: mod_base = OTHER; note = 2'-fluoro nucleotide
  modified_base 9: mod_base = OTHER; note = 2'-O-Methyl nucleotide
  modified_base 10: mod_base = OTHER; note = 2'-fluoro nucleotide
  modified_base 11: mod_base = OTHER; note = 2'-O-Methyl nucleotide
  modified_base 12: mod_base = OTHER; note = 2'-fluoro nucleotide
  modified_base 13: mod_base = OTHER; note = 2'-O-Methyl nucleotide
  modified_base 14: mod_base = OTHER; note = 2'-fluoro nucleotide
  modified_base 15: mod_base = OTHER; note = 2'-O-Methyl nucleotide
  modified_base 16: mod_base = OTHER; note = 2'-fluoro nucleotide
  modified_base 17: mod_base = OTHER; note = 2'-O-Methyl nucleotide
  modified_base 18: mod_base = OTHER; note = 2'-fluoro nucleotide
  modified_base 19: mod_base = OTHER; note = 2'-O-Methyl nucleotide
  modified_base 20: mod_base = OTHER; note = deoxy-thymine phosphorothioate
  misc_feature 1..19: note = RNA
  misc_feature 20..21: note = DNA
gggcacagatgattttggttt

SEQ ID NO: 1616 - DNA, 21 bp, synthetic construct
  misc_feature 1..21: note = Description of Artificial Sequence: Synthetic oligonucleotide
  source 1..21: mol_type = other DNA
  modified_base 1: mod_base = OTHER; note = 2'-O-Methyl nucleotide
  modified_base 2: mod_base = OTHER; note = 2'-O-Methyl nucleotide
  modified_base 3: mod_base = OTHER; note = 2'-fluoro nucleotide
  modified_base 4: mod_base = OTHER; note = 2'-O-Methyl nucleotide
  modified_base 5: mod_base = OTHER; note = 2'-fluoro nucleotide
  modified_base 6: mod_base = OTHER; note = 2'-O-Methyl nucleotide
  modified_base 7: mod_base = OTHER; note = 2'-fluoro nucleotide
  modified_base 8: mod_base = OTHER; note = 2'-O-Methyl nucleotide
  modified_base 9: mod_base = OTHER; note = 2'-fluoro nucleotide
  modified_base 10: mod_base = OTHER; note = 2'-O-Methyl nucleotide
  modified_base 11: mod_base = OTHER; note = 2'-fluoro nucleotide
  modified_base 12: mod_base = OTHER; note = 2'-O-Methyl nucleotide
  modified_base 13: mod_base = OTHER; note = 2'-fluoro nucleotide
  modified_base 14: mod_base = OTHER; note = 2'-O-Methyl nucleotide
  modified_base 15: mod_base = OTHER; note = 2'-fluoro nucleotide
  modified_base 16: mod_base = OTHER; note = 2'-O-Methyl nucleotide
  modified_base 17: mod_base = OTHER; note = 2'-fluoro nucleotide
  modified_base 18: mod_base = OTHER; note = 2'-O-Methyl nucleotide
  modified_base 19: mod_base = OTHER; note = 2'-fluoro nucleotide
  modified_base 20: mod_base = OTHER; note = deoxy-thymine phosphorothioate
  misc_feature 1..19: note = RNA
  misc_feature 20..21: note = DNA
ccaaaatcatctgtgcccatt

SEQ ID NO: 1617 - DNA, 21 bp, synthetic construct
  misc_feature 1..21: note = Description of Artificial Sequence: Synthetic oligonucleotide
  source 1..21: mol_type = other DNA
  modified_base 1: mod_base = OTHER; note = 2'-fluoro nucleotide
  modified_base 2: mod_base = OTHER; note = 2'-fluoro nucleotide
  modified_base 3: mod_base = OTHER; note = 2'-O-Methyl nucleotide
  modified_base 4: mod_base = OTHER; note = 2'-fluoro nucleotide
  modified_base 5: mod_base = OTHER; note = 2'-O-Methyl nucleotide
  modified_base 6: mod_base = OTHER; note = 2'-fluoro nucleotide
  modified_base 7: mod_base = OTHER; note = 2'-O-Methyl nucleotide
  modified_base 8: mod_base = OTHER; note = 2'-fluoro nucleotide
  modified_base 9: mod_base = OTHER; note = 2'-O-Methyl nucleotide
  modified_base 10: mod_base = OTHER; note = 2'-fluoro nucleotide
  modified_base 11: mod_base = OTHER; note = 2'-O-Methyl nucleotide
  modified_base 12: mod_base = OTHER; note = 2'-fluoro nucleotide
  modified_base 13: mod_base = OTHER; note = 2'-O-Methyl nucleotide
  modified_base 14: mod_base = OTHER; note = 2'-fluoro nucleotide
  modified_base 15: mod_base = OTHER; note = 2'-O-Methyl nucleotide
  modified_base 16: mod_base = OTHER; note = 2'-fluoro nucleotide
  modified_base 17: mod_base = OTHER; note = 2'-O-Methyl nucleotide
  modified_base 18: mod_base = OTHER; note = 2'-fluoro nucleotide
  modified_base 19: mod_base = OTHER; note = 2'-O-Methyl nucleotide
  modified_base 20: mod_base = OTHER; note = deoxy-thymine phosphorothioate
  misc_feature 1..19: note = RNA
  misc_feature 20..21: note = DNA
tgggcacagatgattttggtt

SEQ ID NO: 1618 - DNA, 21 bp, synthetic construct
  misc_feature 1..21: note = Description of Artificial Sequence: Synthetic oligonucleotide
  source 1..21: mol_type = other DNA
  modified_base 1: mod_base = OTHER; note = 2'-O-Methyl nucleotide
  modified_base 2: mod_base = OTHER; note = 2'-O-Methyl nucleotide
  modified_base 3: mod_base = OTHER; note = 2'-fluoro nucleotide
  modified_base 4: mod_base = OTHER; note = 2'-O-Methyl nucleotide
  modified_base 5: mod_base = OTHER; note = 2'-fluoro nucleotide
  modified_base 6: mod_base = OTHER; note = 2'-O-Methyl nucleotide
  modified_base 7: mod_base = OTHER; note = 2'-fluoro nucleotide
  modified_base 8: mod_base = OTHER; note = 2'-O-Methyl nucleotide
  modified_base 9: mod_base = OTHER; note = 2'-fluoro nucleotide
  modified_base 10: mod_base = OTHER; note = 2'-O-Methyl nucleotide
  modified_base 11: mod_base = OTHER; note = 2'-fluoro nucleotide
  modified_base 12: mod_base = OTHER; note = 2'-O-Methyl nucleotide
  modified_base 13: mod_base = OTHER; note = 2'-fluoro nucleotide
  modified_base 14: mod_base = OTHER; note = 2'-O-Methyl nucleotide
  modified_base 15: mod_base = OTHER; note = 2'-fluoro nucleotide
  modified_base 16: mod_base = OTHER; note = 2'-O-Methyl nucleotide
  modified_base 17: mod_base = OTHER; note = 2'-fluoro nucleotide
  modified_base 18: mod_base = OTHER; note = 2'-O-Methyl nucleotide
  modified_base 19: mod_base = OTHER; note = 2'-fluoro nucleotide
  modified_base 20: mod_base = OTHER; note = deoxy-thymine phosphorothioate
  misc_feature 1..19: note = RNA
  misc_feature 20..21: note = DNA
aaatcatctgtgcccagcatt

SEQ ID NO: 1619 - DNA, 21 bp, synthetic construct
  misc_feature 1..21: note = Description of Artificial Sequence: Synthetic oligonucleotide
  source 1..21: mol_type = other DNA
  modified_base 1: mod_base = OTHER; note = 2'-fluoro nucleotide
  modified_base 2: mod_base = OTHER; note = 2'-fluoro nucleotide
  modified_base 3: mod_base = OTHER; note = 2'-O-Methyl nucleotide
  modified_base 4: mod_base = OTHER; note = 2'-fluoro nucleotide
  modified_base 5: mod_base = OTHER; note = 2'-O-Methyl nucleotide
  modified_base 6: mod_base = OTHER; note = 2'-fluoro nucleotide
  modified_base 7: mod_base = OTHER; note = 2'-O-Methyl nucleotide
  modified_base 8: mod_base = OTHER; note = 2'-fluoro nucleotide
  modified_base 9: mod_base = OTHER; note = 2'-O-Methyl nucleotide
  modified_base 10: mod_base = OTHER; note = 2'-fluoro nucleotide
  modified_base 11: mod_base = OTHER; note = 2'-O-Methyl nucleotide
  modified_base 12: mod_base = OTHER; note = 2'-fluoro nucleotide
  modified_base 13: mod_base = OTHER; note = 2'-O-Methyl nucleotide
  modified_base 14: mod_base = OTHER; note = 2'-fluoro nucleotide
  modified_base 15: mod_base = OTHER; note = 2'-O-Methyl nucleotide
  modified_base 16: mod_base = OTHER; note = 2'-fluoro nucleotide
  modified_base 17: mod_base = OTHER; note = 2'-O-Methyl nucleotide
  modified_base 18: mod_base = OTHER; note = 2'-fluoro nucleotide
  modified_base 19: mod_base = OTHER; note = 2'-O-Methyl nucleotide
  modified_base 20: mod_base = OTHER; note = deoxy-thymine phosphorothioate
  misc_feature 1..19: note = RNA
  misc_feature 20..21: note = DNA
tgctgggcacagatgattttt

SEQ ID NO: 1620 - DNA, 21 bp, synthetic construct
  misc_feature 1..21: note = Description of Artificial Sequence: Synthetic oligonucleotide
  source 1..21: mol_type = other DNA
  modified_base 1: mod_base = OTHER; note = 2'-O-Methyl nucleotide
  modified_base 2: mod_base = OTHER; note = 2'-O-Methyl nucleotide
  modified_base 3: mod_base = OTHER; note = 2'-fluoro nucleotide
  modified_base 4: mod_base = OTHER; note = 2'-O-Methyl nucleotide
  modified_base 5: mod_base = OTHER; note = 2'-fluoro nucleotide
  modified_base 6: mod_base = OTHER; note = 2'-O-Methyl nucleotide
  modified_base 7: mod_base = OTHER; note = 2'-fluoro nucleotide
  modified_base 8: mod_base = OTHER; note = 2'-O-Methyl nucleotide
  modified_base 9: mod_base = OTHER; note = 2'-fluoro nucleotide
  modified_base 10: mod_base = OTHER; note = 2'-O-Methyl nucleotide
  modified_base 11: mod_base = OTHER; note = 2'-fluoro nucleotide
  modified_base 12: mod_base = OTHER; note = 2'-O-Methyl nucleotide
  modified_base 13: mod_base = OTHER; note = 2'-fluoro nucleotide
  modified_base 14: mod_base = OTHER; note = 2'-O-Methyl nucleotide
  modified_base 15: mod_base = OTHER; note = 2'-fluoro nucleotide
  modified_base 16: mod_base = OTHER; note = 2'-O-Methyl nucleotide
  modified_base 17: mod_base = OTHER; note = 2'-fluoro nucleotide
  modified_base 18: mod_base = OTHER; note = 2'-O-Methyl nucleotide
  modified_base 19: mod_base = OTHER; note = 2'-fluoro nucleotide
  modified_base 20: mod_base = OTHER; note = deoxy-thymine phosphorothioate
  misc_feature 1..19: note = RNA
  misc_feature 20..21: note = DNA
gtgcccagcagtgctccggtt

SEQ ID NO: 1621 - DNA, 21 bp, synthetic construct
  misc_feature 1..21: note = Description of Artificial Sequence: Synthetic oligonucleotide
  source 1..21: mol_type = other DNA
  modified_base 1: mod_base = OTHER; note = 2'-fluoro nucleotide
  modified_base 2: mod_base = OTHER; note = 2'-fluoro nucleotide
  modified_base 3: mod_base = OTHER; note = 2'-O-Methyl nucleotide
  modified_base 4: mod_base = OTHER; note = 2'-fluoro nucleotide
  modified_base 5: mod_base = OTHER; note = 2'-O-Methyl nucleotide
  modified_base 6: mod_base = OTHER; note = 2'-fluoro nucleotide
  modified_base 7: mod_base = OTHER; note = 2'-O-Methyl nucleotide
  modified_base 8: mod_base = OTHER; note = 2'-fluoro nucleotide
  modified_base 9: mod_base = OTHER; note = 2'-O-Methyl nucleotide
  modified_base 10: mod_base = OTHER; note = 2'-fluoro nucleotide
  modified_base 11: mod_base = OTHER; note = 2'-O-Methyl nucleotide
  modified_base 12: mod_base = OTHER; note = 2'-fluoro nucleotide
  modified_base 13: mod_base = OTHER; note = 2'-O-Methyl nucleotide
  modified_base 14: mod_base = OTHER; note = 2'-fluoro nucleotide
  modified_base 15: mod_base = OTHER; note = 2'-O-Methyl nucleotide
  modified_base 16: mod_base = OTHER; note = 2'-fluoro nucleotide
  modified_base 17: mod_base = OTHER; note = 2'-O-Methyl nucleotide
  modified_base 18: mod_base = OTHER; note = 2'-fluoro nucleotide
  modified_base 19: mod_base = OTHER; note = 2'-O-Methyl nucleotide
  modified_base 20: mod_base = OTHER; note = deoxy-thymine phosphorothioate
  misc_feature 1..19: note = RNA
  misc_feature 20..21: note = DNA
ccggagcactgctgggcactt

SEQ ID NO: 1622 - DNA, 21 bp, synthetic construct
  misc_feature 1..21: note = Description of Artificial Sequence: Synthetic oligonucleotide
  source 1..21: mol_type = other DNA
  modified_base 1: mod_base = OTHER; note = 2'-O-Methyl nucleotide
  modified_base 2: mod_base = OTHER; note = 2'-O-Methyl nucleotide
  modified_base 3: mod_base = OTHER; note = 2'-fluoro nucleotide
  modified_base 4: mod_base = OTHER; note = 2'-O-Methyl nucleotide
  modified_base 5: mod_base = OTHER; note = 2'-fluoro nucleotide
  modified_base 6: mod_base = OTHER; note = 2'-O-Methyl nucleotide
  modified_base 7: mod_base = OTHER; note = 2'-fluoro nucleotide
  modified_base 8: mod_base = OTHER; note = 2'-O-Methyl nucleotide
  modified_base 9: mod_base = OTHER; note = 2'-fluoro nucleotide
  modified_base 10: mod_base = OTHER; note = 2'-O-Methyl nucleotide
  modified_base 11: mod_base = OTHER; note = 2'-fluoro nucleotide
  modified_base 12: mod_base = OTHER; note = 2'-O-Methyl nucleotide
  modified_base 13: mod_base = OTHER; note = 2'-fluoro nucleotide
  modified_base 14: mod_base = OTHER; note = 2'-O-Methyl nucleotide
  modified_base 15: mod_base = OTHER; note = 2'-fluoro nucleotide
  modified_base 16: mod_base = OTHER; note = 2'-O-Methyl nucleotide
  modified_base 17: mod_base = OTHER; note = 2'-fluoro nucleotide
  modified_base 18: mod_base = OTHER; note = 2'-O-Methyl nucleotide
  modified_base 19: mod_base = OTHER; note = 2'-fluoro nucleotide
  modified_base 20: mod_base = OTHER; note = deoxy-thymine phosphorothioate
  misc_feature 1..19: note = RNA
  misc_feature 20..21: note = DNA
gcccagcagtgctccgggctt

SEQ ID NO: 1623 - DNA, 21 bp, synthetic construct
  misc_feature 1..21: note = Description of Artificial Sequence: Synthetic oligonucleotide
  source 1..21: mol_type = other DNA
  modified_base 1: mod_base = OTHER; note = 2'-fluoro nucleotide
  modified_base 2: mod_base = OTHER; note = 2'-fluoro nucleotide
  modified_base 3: mod_base = OTHER; note = 2'-O-Methyl nucleotide
  modified_base 4: mod_base = OTHER; note = 2'-fluoro nucleotide
  modified_base 5: mod_base = OTHER; note = 2'-O-Methyl nucleotide
  modified_base 6: mod_base = OTHER; note = 2'-fluoro nucleotide
  modified_base 7: mod_base = OTHER; note = 2'-O-Methyl nucleotide
  modified_base 8: mod_base = OTHER; note = 2'-fluoro nucleotide
  modified_base 9: mod_base = OTHER; note = 2'-O-Methyl nucleotide
  modified_base 10: mod_base = OTHER; note = 2'-fluoro nucleotide
  modified_base 11: mod_base = OTHER; note = 2'-O-Methyl nucleotide
  modified_base 12: mod_base = OTHER; note = 2'-fluoro nucleotide
  modified_base 13: mod_base = OTHER; note = 2'-O-Methyl nucleotide
  modified_base 14: mod_base = OTHER; note = 2'-fluoro nucleotide
  modified_base 15: mod_base = OTHER; note = 2'-O-Methyl nucleotide
  modified_base 16: mod_base = OTHER; note = 2'-fluoro nucleotide
  modified_base 17: mod_base = OTHER; note = 2'-O-Methyl nucleotide
  modified_base 18: mod_base = OTHER; note = 2'-fluoro nucleotide
  modified_base 19: mod_base = OTHER; note = 2'-O-Methyl nucleotide
  modified_base 20: mod_base = OTHER; note = deoxy-thymine phosphorothioate
  misc_feature 1..19: note = RNA
  misc_feature 20..21: note = DNA
gcccggagcactgctgggctt

SEQ ID NO: 1624 - DNA, 21 bp, synthetic construct
  misc_feature 1..21: note = Description of Artificial Sequence: Synthetic oligonucleotide
  source 1..21: mol_type = other DNA
  modified_base 1: mod_base = OTHER; note = 2'-O-Methyl nucleotide
  modified_base 2: mod_base = OTHER; note = 2'-O-Methyl nucleotide
  modified_base 3: mod_base = OTHER; note = 2'-fluoro nucleotide
  modified_base 4: mod_base = OTHER; note = 2'-O-Methyl nucleotide
  modified_base 5: mod_base = OTHER; note = 2'-fluoro nucleotide
  modified_base 6: mod_base = OTHER; note = 2'-O-Methyl nucleotide
  modified_base 7: mod_base = OTHER; note = 2'-fluoro nucleotide
  modified_base 8: mod_base = OTHER; note = 2'-O-Methyl nucleotide
  modified_base 9: mod_base = OTHER; note = 2'-fluoro nucleotide
  modified_base 10: mod_base = OTHER; note = 2'-O-Methyl nucleotide
  modified_base 11: mod_base = OTHER; note = 2'-fluoro nucleotide
  modified_base 12: mod_base = OTHER; note = 2'-O-Methyl nucleotide
  modified_base 13: mod_base = OTHER; note = 2'-fluoro nucleotide
  modified_base 14: mod_base = OTHER; note = 2'-O-Methyl nucleotide
  modified_base 15: mod_base = OTHER; note = 2'-fluoro nucleotide
  modified_base 16: mod_base = OTHER; note = 2'-O-Methyl nucleotide
  modified_base 17: mod_base = OTHER; note = 2'-fluoro nucleotide
  modified_base 18: mod_base = OTHER; note = 2'-O-Methyl nucleotide
  modified_base 19: mod_base = OTHER; note = 2'-fluoro nucleotide
  modified_base 20: mod_base = OTHER; note = deoxy-thymine phosphorothioate
  misc_feature 1..19: note = RNA
  misc_feature 20..21: note = DNA
ccagtgactgctgccacaatt

SEQ ID NO: 1625 - DNA, 21 bp, synthetic construct
  misc_feature 1..21: note = Description of Artificial Sequence: Synthetic oligonucleotide
  source 1..21: mol_type = other DNA
  modified_base 1: mod_base = OTHER; note = 2'-fluoro nucleotide
  modified_base 2: mod_base = OTHER; note = 2'-fluoro nucleotide
  modified_base 3: mod_base = OTHER; note = 2'-O-Methyl nucleotide
  modified_base 4: mod_base = OTHER; note = 2'-fluoro nucleotide
  modified_base 5: mod_base = OTHER; note = 2'-O-Methyl nucleotide
  modified_base 6: mod_base = OTHER; note = 2'-fluoro nucleotide
  modified_base 7: mod_base = OTHER; note = 2'-O-Methyl nucleotide
  modified_base 8: mod_base = OTHER; note = 2'-fluoro nucleotide
  modified_base 9: mod_base = OTHER; note = 2'-O-Methyl nucleotide
  modified_base 10: mod_base = OTHER; note = 2'-fluoro nucleotide
  modified_base 11: mod_base = OTHER; note = 2'-O-Methyl nucleotide
  modified_base 12: mod_base = OTHER; note = 2'-fluoro nucleotide
  modified_base 13: mod_base = OTHER; note = 2'-O-Methyl nucleotide
  modified_base 14: mod_base = OTHER; note = 2'-fluoro nucleotide
  modified_base 15: mod_base = OTHER; note = 2'-O-Methyl nucleotide
  modified_base 16: mod_base = OTHER; note = 2'-fluoro nucleotide
  modified_base 17: mod_base = OTHER; note = 2'-O-Methyl nucleotide
  modified_base 18: mod_base = OTHER; note = 2'-fluoro nucleotide
  modified_base 19: mod_base = OTHER; note = 2'-O-Methyl nucleotide
  modified_base 20: mod_base = OTHER; note = deoxy-thymine phosphorothioate
  misc_feature 1..19: note = RNA
  misc_feature 20..21: note = DNA
ttgtggcagcagtcactggtt

SEQ ID NO: 1626 - DNA, 21 bp, synthetic construct
  misc_feature 1..21: note = Description of Artificial Sequence: Synthetic oligonucleotide
  source 1..21: mol_type = other DNA
  modified_base 1: mod_base = OTHER; note = 2'-O-Methyl nucleotide
  modified_base 2: mod_base = OTHER; note = 2'-O-Methyl nucleotide
  modified_base 3: mod_base = OTHER; note = 2'-fluoro nucleotide
  modified_base 4: mod_base = OTHER; note = 2'-O-Methyl nucleotide
  modified_base 5: mod_base = OTHER; note = 2'-fluoro nucleotide
  modified_base 6: mod_base = OTHER; note = 2'-O-Methyl nucleotide
  modified_base 7: mod_base = OTHER; note = 2'-fluoro nucleotide
  modified_base 8: mod_base = OTHER; note = 2'-O-Methyl nucleotide
  modified_base 9: mod_base = OTHER; note = 2'-fluoro nucleotide
  modified_base 10: mod_base = OTHER; note = 2'-O-Methyl nucleotide
  modified_base 11: mod_base = OTHER; note = 2'-fluoro nucleotide
  modified_base 12: mod_base = OTHER; note = 2'-O-Methyl nucleotide
  modified_base 13: mod_base = OTHER; note = 2'-fluoro nucleotide
  modified_base 14: mod_base = OTHER; note = 2'-O-Methyl nucleotide
  modified_base 15: mod_base = OTHER; note = 2'-fluoro nucleotide
  modified_base 16: mod_base = OTHER; note = 2'-O-Methyl nucleotide
  modified_base 17: mod_base = OTHER; note = 2'-fluoro nucleotide
  modified_base 18: mod_base = OTHER; note = 2'-O-Methyl nucleotide
  modified_base 19: mod_base = OTHER; note = 2'-fluoro nucleotide
  modified_base 20: mod_base = OTHER; note = deoxy-thymine phosphorothioate
  misc_feature 1..19: note = RNA
  misc_feature 20..21: note = DNA
cagtgactgctgccacaactt

SEQ ID NO: 1627 - DNA, 21 bp, synthetic construct
  misc_feature 1..21: note = Description of Artificial Sequence: Synthetic oligonucleotide
  source 1..21: mol_type = other DNA
  modified_base 1: mod_base = OTHER; note = 2'-fluoro nucleotide
  modified_base 2: mod_base = OTHER; note = 2'-fluoro nucleotide
  modified_base 3: mod_base = OTHER; note = 2'-O-Methyl nucleotide
  modified_base 4: mod_base = OTHER; note = 2'-fluoro nucleotide
  modified_base 5: mod_base = OTHER; note = 2'-O-Methyl nucleotide
  modified_base 6: mod_base = OTHER; note = 2'-fluoro nucleotide
  modified_base 7: mod_base = OTHER; note = 2'-O-Methyl nucleotide
  modified_base 8: mod_base = OTHER; note = 2'-fluoro nucleotide
  modified_base 9: mod_base = OTHER; note = 2'-O-Methyl nucleotide
  modified_base 10: mod_base = OTHER; note = 2'-fluoro nucleotide
  modified_base 11: mod_base = OTHER; note = 2'-O-Methyl nucleotide
  modified_base 12: mod_base = OTHER; note = 2'-fluoro nucleotide
  modified_base 13: mod_base = OTHER; note = 2'-O-Methyl nucleotide
  modified_base 14: mod_base = OTHER; note = 2'-fluoro nucleotide
  modified_base 15: mod_base = OTHER; note = 2'-O-Methyl nucleotide
  modified_base 16: mod_base = OTHER; note = 2'-fluoro nucleotide
  modified_base 17: mod_base = OTHER; note = 2'-O-Methyl nucleotide
  modified_base 18: mod_base = OTHER; note = 2'-fluoro nucleotide
  modified_base 19: mod_base = OTHER; note = 2'-O-Methyl nucleotide
  modified_base 20: mod_base = OTHER; note = deoxy-thymine phosphorothioate
  misc_feature 1..19: note = RNA
  misc_feature 20..21: note = DNA
gttgtggcagcagtcactgtt

SEQ ID NO: 1628 - DNA, 21 bp, synthetic construct
  misc_feature 1..21: note = Description of Artificial Sequence: Synthetic oligonucleotide
  source 1..21: mol_type = other DNA
  modified_base 1: mod_base = OTHER; note = 2'-O-Methyl nucleotide
  modified_base 2: mod_base = OTHER; note = 2'-O-Methyl nucleotide
  modified_base 3: mod_base = OTHER; note = 2'-fluoro nucleotide
  modified_base 4: mod_base = OTHER; note = 2'-O-Methyl nucleotide
  modified_base 5: mod_base = OTHER; note = 2'-fluoro nucleotide
  modified_base 6: mod_base = OTHER; note = 2'-O-Methyl nucleotide
  modified_base 7: mod_base = OTHER; note = 2'-fluoro nucleotide
  modified_base 8: mod_base = OTHER; note = 2'-O-Methyl nucleotide
  modified_base 9: mod_base = OTHER; note = 2'-fluoro nucleotide
  modified_base 10: mod_base = OTHER; note = 2'-O-Methyl nucleotide
  modified_base 11: mod_base = OTHER; note = 2'-fluoro nucleotide
  modified_base 12: mod_base = OTHER; note = 2'-O-Methyl nucleotide
  modified_base 13: mod_base = OTHER; note = 2'-fluoro nucleotide
  modified_base 14: mod_base = OTHER; note = 2'-O-Methyl nucleotide
  modified_base 15: mod_base = OTHER; note = 2'-fluoro nucleotide
  modified_base 16: mod_base = OTHER; note = 2'-O-Methyl nucleotide
  modified_base 17: mod_base = OTHER; note = 2'-fluoro nucleotide
  modified_base 18: mod_base = OTHER; note = 2'-O-Methyl nucleotide
  modified_base 19: mod_base = OTHER; note = 2'-fluoro nucleotide
  modified_base 20: mod_base = OTHER; note = deoxy-thymine phosphorothioate
  misc_feature 1..19: note = RNA
  misc_feature 20..21: note = DNA
gagagcgactgcctggtcttt

SEQ ID NO: 1629 - DNA, 21 bp, synthetic construct
  misc_feature 1..21: note = Description of Artificial Sequence: Synthetic oligonucleotide
  source 1..21: mol_type = other DNA
  modified_base 1: mod_base = OTHER; note = 2'-fluoro nucleotide
  modified_base 2: mod_base = OTHER; note = 2'-fluoro nucleotide
  modified_base 3: mod_base = OTHER; note = 2'-O-Methyl nucleotide
  modified_base 4: mod_base = OTHER; note = 2'-fluoro nucleotide
  modified_base 5: mod_base = OTHER; note = 2'-O-Methyl nucleotide
  modified_base 6: mod_base = OTHER; note = 2'-fluoro nucleotide
  modified_base 7: mod_base = OTHER; note = 2'-O-Methyl nucleotide
  modified_base 8: mod_base = OTHER; note = 2'-fluoro nucleotide
  modified_base 9: mod_base = OTHER; note = 2'-O-Methyl nucleotide
  modified_base 10: mod_base = OTHER; note = 2'-fluoro nucleotide
  modified_base 11: mod_base = OTHER; note = 2'-O-Methyl nucleotide
  modified_base 12: mod_base = OTHER; note = 2'-fluoro nucleotide
  modified_base 13: mod_base = OTHER; note = 2'-O-Methyl nucleotide
  modified_base 14: mod_base = OTHER; note = 2'-fluoro nucleotide
  modified_base 15: mod_base = OTHER; note = 2'-O-Methyl nucleotide
  modified_base 16: mod_base = OTHER; note = 2'-fluoro nucleotide
  modified_base 17: mod_base = OTHER; note = 2'-O-Methyl nucleotide
  modified_base 18: mod_base = OTHER; note = 2'-fluoro nucleotide
  modified_base 19: mod_base = OTHER; note = 2'-O-Methyl nucleotide
  modified_base 20: mod_base = OTHER; note = deoxy-thymine phosphorothioate
  misc_feature 1..19: note = RNA
  misc_feature 20..21: note = DNA
agaccaggcagtcgctctctt

SEQ ID NO: 1630 - DNA, 21 bp, synthetic construct
  misc_feature 1..21: note = Description of Artificial Sequence: Synthetic oligonucleotide
  source 1..21: mol_type = other DNA
  modified_base 1: mod_base = OTHER; note = 2'-O-Methyl nucleotide
  modified_base 2: mod_base = OTHER; note = 2'-O-Methyl nucleotide
  modified_base 3: mod_base = OTHER; note = 2'-fluoro nucleotide
  modified_base 4: mod_base = OTHER; note = 2'-O-Methyl nucleotide
  modified_base 5: mod_base = OTHER; note = 2'-fluoro nucleotide
  modified_base 6: mod_base = OTHER; note = 2'-O-Methyl nucleotide
  modified_base 7: mod_base = OTHER; note = 2'-fluoro nucleotide
  modified_base 8: mod_base = OTHER; note = 2'-O-Methyl nucleotide
  modified_base 9: mod_base = OTHER; note = 2'-fluoro nucleotide
  modified_base 10: mod_base = OTHER; note = 2'-O-Methyl nucleotide
  modified_base 11: mod_base = OTHER; note = 2'-fluoro nucleotide
  modified_base 12: mod_base = OTHER; note = 2'-O-Methyl nucleotide
  modified_base 13: mod_base = OTHER; note = 2'-fluoro nucleotide
  modified_base 14: mod_base = OTHER; note = 2'-O-Methyl nucleotide
  modified_base 15: mod_base = OTHER; note = 2'-fluoro nucleotide
  modified_base 16: mod_base = OTHER; note = 2'-O-Methyl nucleotide
  modified_base 17: mod_base = OTHER; note = 2'-fluoro nucleotide
  modified_base 18: mod_base = OTHER; note = 2'-O-Methyl nucleotide
  modified_base 19: mod_base = OTHER; note = 2'-fluoro nucleotide
  modified_base 20: mod_base = OTHER; note = deoxy-thymine phosphorothioate
  misc_feature 1..19: note = RNA
  misc_feature 20..21: note = DNA
agagcgactgcctggtctgtt

SEQ ID NO: 1631 - DNA, 21 bp, synthetic construct
  misc_feature 1..21: note = Description of Artificial Sequence: Synthetic oligonucleotide
  source 1..21: mol_type = other DNA
  modified_base 1: mod_base = OTHER; note = 2'-fluoro nucleotide
  modified_base 2: mod_base = OTHER; note = 2'-fluoro nucleotide
  modified_base 3: mod_base = OTHER; note = 2'-O-Methyl nucleotide
  modified_base 4: mod_base = OTHER; note = 2'-fluoro nucleotide
  modified_base 5: mod_base = OTHER; note = 2'-O-Methyl nucleotide
  modified_base 6: mod_base = OTHER; note = 2'-fluoro nucleotide
  modified_base 7: mod_base = OTHER; note = 2'-O-Methyl nucleotide
  modified_base 8: mod_base = OTHER; note = 2'-fluoro nucleotide
  modified_base 9: mod_base = OTHER; note = 2'-O-Methyl nucleotide
  modified_base 10: mod_base = OTHER; note = 2'-fluoro nucleotide
  modified_base 11: mod_base = OTHER; note = 2'-O-Methyl nucleotide
  modified_base 12: mod_base = OTHER; note = 2'-fluoro nucleotide
  modified_base 13: mod_base = OTHER; note = 2'-O-Methyl nucleotide
  modified_base 14: mod_base = OTHER; note = 2'-fluoro nucleotide
  modified_base 15: mod_base = OTHER; note = 2'-O-Methyl nucleotide
  modified_base 16: mod_base = OTHER; note = 2'-fluoro nucleotide
  modified_base 17: mod_base = OTHER; note = 2'-O-Methyl nucleotide
  modified_base 18: mod_base = OTHER; note = 2'-fluoro nucleotide
  modified_base 19: mod_base = OTHER; note = 2'-O-Methyl nucleotide
  modified_base 20: mod_base = OTHER; note = deoxy-thymine phosphorothioate
  misc_feature 1..19: note = RNA
  misc_feature 20..21: note = DNA
cagaccaggcagtcgctcttt

SEQ ID NO: 1632 - DNA, 21 bp, synthetic construct
  misc_feature 1..21: note = Description of Artificial Sequence: Synthetic oligonucleotide
  source 1..21: mol_type = other DNA
  modified_base 1: mod_base = OTHER; note = 2'-O-Methyl nucleotide
  modified_base 2: mod_base = OTHER; note = 2'-O-Methyl nucleotide
  modified_base 3: mod_base = OTHER; note = 2'-fluoro nucleotide
  modified_base 4: mod_base = OTHER; note = 2'-O-Methyl nucleotide
  modified_base 5: mod_base = OTHER; note = 2'-fluoro nucleotide
  modified_base 6: mod_base = OTHER; note = 2'-O-Methyl nucleotide
  modified_base 7: mod_base = OTHER; note = 2'-fluoro nucleotide
  modified_base 8: mod_base = OTHER; note = 2'-O-Methyl nucleotide
  modified_base 9: mod_base = OTHER; note = 2'-fluoro nucleotide
  modified_base 10: mod_base = OTHER; note = 2'-O-Methyl nucleotide
  modified_base 11: mod_base = OTHER; note = 2'-fluoro nucleotide
  modified_base 12: mod_base = OTHER; note = 2'-O-Methyl nucleotide
  modified_base 13: mod_base = OTHER; note = 2'-fluoro nucleotide
  modified_base 14: mod_base = OTHER; note = 2'-O-Methyl nucleotide
  modified_base 15: mod_base = OTHER; note = 2'-fluoro nucleotide
  modified_base 16: mod_base = OTHER; note = 2'-O-Methyl nucleotide
  modified_base 17: mod_base = OTHER; note = 2'-fluoro nucleotide
  modified_base 18: mod_base = OTHER; note = 2'-O-Methyl nucleotide
  modified_base 19: mod_base = OTHER; note = 2'-fluoro nucleotide
  modified_base 20: mod_base = OTHER; note = deoxy-thymine phosphorothioate
  misc_feature 1..19: note = RNA
  misc_feature 20..21: note = DNA
gagcgactgcctggtctgctt

SEQ ID NO: 1633 - DNA, 21 bp, synthetic construct
  misc_feature 1..21: note = Description of Artificial Sequence: Synthetic oligonucleotide
  source 1..21: mol_type = other DNA
  modified_base 1: mod_base = OTHER; note = 2'-fluoro nucleotide
  modified_base 2: mod_base = OTHER; note = 2'-fluoro nucleotide
  modified_base 3: mod_base = OTHER; note = 2'-O-Methyl nucleotide
  modified_base 4: mod_base = OTHER; note = 2'-fluoro nucleotide
  modified_base 5: mod_base = OTHER; note = 2'-O-Methyl nucleotide
  modified_base 6: mod_base = OTHER; note = 2'-fluoro nucleotide
  modified_base 7: mod_base = OTHER; note = 2'-O-Methyl nucleotide
  modified_base 8: mod_base = OTHER; note = 2'-fluoro nucleotide
  modified_base 9: mod_base = OTHER; note = 2'-O-Methyl nucleotide
  modified_base 10: mod_base = OTHER; note = 2'-fluoro nucleotide
  modified_base 11: mod_base = OTHER; note = 2'-O-Methyl nucleotide
  modified_base 12: mod_base = OTHER; note = 2'-fluoro nucleotide
  modified_base 13: mod_base = OTHER; note = 2'-O-Methyl nucleotide
  modified_base 14: mod_base = OTHER; note = 2'-fluoro nucleotide
  modified_base 15: mod_base = OTHER; note = 2'-O-Methyl nucleotide
  modified_base 16: mod_base = OTHER; note = 2'-fluoro nucleotide
  modified_base 17: mod_base = OTHER; note = 2'-O-Methyl nucleotide
  modified_base 18: mod_base = OTHER; note = 2'-fluoro nucleotide
  modified_base 19: mod_base = OTHER; note = 2'-O-Methyl nucleotide
  modified_base 20: mod_base = OTHER; note = deoxy-thymine phosphorothioate
  misc_feature 1..19: note = RNA
  misc_feature 20..21: note = DNA
gcagaccaggcagtcgctctt

SEQ ID NO: 1634 - DNA, 21 bp, synthetic construct
  misc_feature 1..21: note = Description of Artificial Sequence: Synthetic oligonucleotide
  source 1..21: mol_type = other DNA
  modified_base 1: mod_base = OTHER; note = 2'-O-Methyl nucleotide
  modified_base 2: mod_base = OTHER; note = 2'-O-Methyl nucleotide
  modified_base 3: mod_base = OTHER; note = 2'-fluoro nucleotide
  modified_base 4: mod_base = OTHER; note = 2'-O-Methyl nucleotide
  modified_base 5: mod_base = OTHER; note = 2'-fluoro nucleotide
  modified_base 6: mod_base = OTHER; note = 2'-O-Methyl nucleotide
  modified_base 7: mod_base = OTHER; note = 2'-fluoro nucleotide
  modified_base 8: mod_base = OTHER; note = 2'-O-Methyl nucleotide
  modified_base 9: mod_base = OTHER; note = 2'-fluoro nucleotide
  modified_base 10: mod_base = OTHER; note = 2'-O-Methyl nucleotide
  modified_base 11: mod_base = OTHER; note = 2'-fluoro nucleotide
  modified_base 12: mod_base = OTHER; note = 2'-O-Methyl nucleotide
  modified_base 13: mod_base = OTHER; note = 2'-fluoro nucleotide
  modified_base 14: mod_base = OTHER; note = 2'-O-Methyl nucleotide
  modified_base 15: mod_base = OTHER; note = 2'-fluoro nucleotide
  modified_base 16: mod_base = OTHER; note = 2'-O-Methyl nucleotide
  modified_base 17: mod_base = OTHER; note = 2'-fluoro nucleotide
  modified_base 18: mod_base = OTHER; note = 2'-O-Methyl nucleotide
  modified_base 19: mod_base = OTHER; note = 2'-fluoro nucleotide
  modified_base 20: mod_base = OTHER; note = deoxy-thymine phosphorothioate
  misc_feature 1..19: note = RNA
  misc_feature 20..21: note = DNA
agcgactgcctggtctgcctt

SEQ ID NO: 1635 - DNA, 21 bp, synthetic construct
  misc_feature 1..21: note = Description of Artificial Sequence: Synthetic oligonucleotide
  source 1..21: mol_type = other DNA
  modified_base 1: mod_base = OTHER; note = 2'-fluoro nucleotide
  modified_base 2: mod_base = OTHER; note = 2'-fluoro nucleotide
  modified_base 3: mod_base = OTHER; note = 2'-O-Methyl nucleotide
  modified_base 4: mod_base = OTHER; note = 2'-fluoro nucleotide
  modified_base 5: mod_base = OTHER; note = 2'-O-Methyl nucleotide
  modified_base 6: mod_base = OTHER; note = 2'-fluoro nucleotide
  modified_base 7: mod_base = OTHER; note = 2'-O-Methyl nucleotide
  modified_base 8: mod_base = OTHER; note = 2'-fluoro nucleotide
  modified_base 9: mod_base = OTHER; note = 2'-O-Methyl nucleotide
  modified_base 10: mod_base = OTHER; note = 2'-fluoro nucleotide
  modified_base 11: mod_base = OTHER; note = 2'-O-Methyl nucleotide
  modified_base 12: mod_base = OTHER; note = 2'-fluoro nucleotide
  modified_base 13: mod_base = OTHER; note = 2'-O-Methyl nucleotide
  modified_base 14: mod_base = OTHER; note = 2'-fluoro nucleotide
  modified_base 15: mod_base = OTHER; note = 2'-O-Methyl nucleotide
  modified_base 16: mod_base = OTHER; note = 2'-fluoro nucleotide
  modified_base 17: mod_base = OTHER; note = 2'-O-Methyl nucleotide
  modified_base 18: mod_base = OTHER; note = 2'-fluoro nucleotide
  modified_base 19: mod_base = OTHER; note = 2'-O-Methyl nucleotide
  modified_base 20: mod_base = OTHER; note = deoxy-thymine phosphorothioate
  misc_feature 1..19: note = RNA
  misc_feature 20..21: note = DNA
ggcagaccaggcagtcgcttt

SEQ ID NO: 1636 - DNA, 21 bp, synthetic construct
  misc_feature 1..21: note = Description of Artificial Sequence: Synthetic oligonucleotide
  source 1..21: mol_type = other DNA
  modified_base 1: mod_base = OTHER; note = 2'-O-Methyl nucleotide
  modified_base 2: mod_base = OTHER; note = 2'-O-Methyl nucleotide
  modified_base 3: mod_base = OTHER; note = 2'-fluoro nucleotide
  modified_base 4: mod_base = OTHER; note = 2'-O-Methyl nucleotide
  modified_base 5: mod_base = OTHER; note = 2'-fluoro nucleotide
  modified_base 6: mod_base = OTHER; note = 2'-O-Methyl nucleotide
  modified_base 7: mod_base = OTHER; note = 2'-fluoro nucleotide
  modified_base 8: mod_base = OTHER; note = 2'-O-Methyl nucleotide
  modified_base 9: mod_base = OTHER; note = 2'-fluoro nucleotide
  modified_base 10: mod_base = OTHER; note = 2'-O-Methyl nucleotide
  modified_base 11: mod_base = OTHER; note = 2'-fluoro nucleotide
  modified_base 12: mod_base = OTHER; note = 2'-O-Methyl nucleotide
  modified_base 13: mod_base = OTHER; note = 2'-fluoro nucleotide
  modified_base 14: mod_base = OTHER; note = 2'-O-Methyl nucleotide
  modified_base 15: mod_base = OTHER; note = 2'-fluoro nucleotide
  modified_base 16: mod_base = OTHER; note = 2'-O-Methyl nucleotide
  modified_base 17: mod_base = OTHER; note = 2'-fluoro nucleotide
  modified_base 18: mod_base = OTHER; note = 2'-O-Methyl nucleotide
  modified_base 19: mod_base = OTHER; note = 2'-fluoro nucleotide
  modified_base 20: mod_base = OTHER; note = deoxy-thymine phosphorothioate
  misc_feature 1..19: note = RNA
  misc_feature 20..21: note = DNA
gcgactgcctggtctgccgtt

SEQ ID NO: 1637 - DNA, 21 bp, synthetic construct
  misc_feature 1..21: note = Description of Artificial Sequence: Synthetic oligonucleotide
  source 1..21: mol_type = other DNA
  modified_base 1: mod_base = OTHER; note = 2'-fluoro nucleotide
  modified_base 2: mod_base = OTHER; note = 2'-fluoro nucleotide
  modified_base 3: mod_base = OTHER; note = 2'-O-Methyl nucleotide
  modified_base 4: mod_base = OTHER; note = 2'-fluoro nucleotide
  modified_base 5: mod_base = OTHER; note = 2'-O-Methyl nucleotide
  modified_base 6: mod_base = OTHER; note = 2'-fluoro nucleotide
  modified_base 7: mod_base = OTHER; note = 2'-O-Methyl nucleotide
  modified_base 8: mod_base = OTHER; note = 2'-fluoro nucleotide
  modified_base 9: mod_base = OTHER; note = 2'-O-Methyl nucleotide
  modified_base 10: mod_base = OTHER; note = 2'-fluoro nucleotide
  modified_base 11: mod_base = OTHER; note = 2'-O-Methyl nucleotide
  modified_base 12: mod_base = OTHER; note = 2'-fluoro nucleotide
  modified_base 13: mod_base = OTHER; note = 2'-O-Methyl nucleotide
  modified_base 14: mod_base = OTHER; note = 2'-fluoro nucleotide
  modified_base 15: mod_base = OTHER; note = 2'-O-Methyl nucleotide
  modified_base 16: mod_base = OTHER; note = 2'-fluoro nucleotide
  modified_base 17: mod_base = OTHER; note = 2'-O-Methyl nucleotide
  modified_base 18: mod_base = OTHER; note = 2'-fluoro nucleotide
  modified_base 19: mod_base = OTHER; note = 2'-O-Methyl nucleotide
  modified_base 20: mod_base = OTHER; note = deoxy-thymine phosphorothioate
  misc_feature 1..19: note = RNA
  misc_feature 20..21: note = DNA
cggcagaccaggcagtcgctt

SEQ ID NO: 1638 - DNA, 21 bp, synthetic construct
  misc_feature 1..21: note = Description of Artificial Sequence: Synthetic oligonucleotide
  source 1..21: mol_type = other DNA
  modified_base 1: mod_base = OTHER; note = 2'-O-Methyl nucleotide
  modified_base 2: mod_base = OTHER; note = 2'-O-Methyl nucleotide
  modified_base 3: mod_base = OTHER; note = 2'-fluoro nucleotide
  modified_base 4: mod_base = OTHER; note = 2'-O-Methyl nucleotide
  modified_base 5: mod_base = OTHER; note = 2'-fluoro nucleotide
  modified_base 6: mod_base = OTHER; note = 2'-O-Methyl nucleotide
  modified_base 7: mod_base = OTHER; note = 2'-fluoro nucleotide
  modified_base 8: mod_base = OTHER; note = 2'-O-Methyl nucleotide
  modified_base 9: mod_base = OTHER; note = 2'-fluoro nucleotide
  modified_base 10: mod_base = OTHER; note = 2'-O-Methyl nucleotide
  modified_base 11: mod_base = OTHER; note = 2'-fluoro nucleotide
  modified_base 12: mod_base = OTHER; note = 2'-O-Methyl nucleotide
  modified_base 13: mod_base = OTHER; note = 2'-fluoro nucleotide
  modified_base 14: mod_base = OTHER; note = 2'-O-Methyl nucleotide
  modified_base 15: mod_base = OTHER; note = 2'-fluoro nucleotide
  modified_base 16: mod_base = OTHER; note = 2'-O-Methyl nucleotide
  modified_base 17: mod_base = OTHER; note = 2'-fluoro nucleotide
  modified_base 18: mod_base = OTHER; note = 2'-O-Methyl nucleotide
  modified_base 19: mod_base = OTHER; note = 2'-fluoro nucleotide
  modified_base 20: mod_base = OTHER; note = deoxy-thymine phosphorothioate
  misc_feature 1..19: note = RNA
  misc_feature 20..21: note = DNA
cgactgcctggtctgccgctt

SEQ ID NO: 1639 - DNA, 21 bp, synthetic construct
  misc_feature 1..21: note = Description of Artificial Sequence: Synthetic oligonucleotide
  source 1..21: mol_type = other DNA
  modified_base 1: mod_base = OTHER; note = 2'-fluoro nucleotide
  modified_base 2: mod_base = OTHER; note = 2'-fluoro nucleotide
  modified_base 3: mod_base = OTHER; note = 2'-O-Methyl nucleotide
  modified_base 4: mod_base = OTHER; note = 2'-fluoro nucleotide
  modified_base 5: mod_base = OTHER; note = 2'-O-Methyl nucleotide
  modified_base 6: mod_base = OTHER; note = 2'-fluoro nucleotide
  modified_base 7: mod_base = OTHER; note = 2'-O-Methyl nucleotide
  modified_base 8: mod_base = OTHER; note = 2'-fluoro nucleotide
  modified_base 9: mod_base = OTHER; note = 2'-O-Methyl nucleotide
  modified_base 10: mod_base = OTHER; note = 2'-fluoro nucleotide
  modified_base 11: mod_base = OTHER; note = 2'-O-Methyl nucleotide
  modified_base 12: mod_base = OTHER; note = 2'-fluoro nucleotide
  modified_base 13: mod_base = OTHER; note = 2'-O-Methyl nucleotide
  modified_base 14: mod_base = OTHER; note = 2'-fluoro nucleotide
  modified_base 15: mod_base = OTHER; note = 2'-O-Methyl nucleotide
  modified_base 16: mod_base = OTHER; note = 2'-fluoro nucleotide
  modified_base 17: mod_base = OTHER; note = 2'-O-Methyl nucleotide
  modified_base 18: mod_base = OTHER; note = 2'-fluoro nucleotide
  modified_base 19: mod_base = OTHER; note = 2'-O-Methyl nucleotide
  modified_base 20: mod_base = OTHER; note = deoxy-thymine phosphorothioate
  misc_feature 1..19: note = RNA
  misc_feature 20..21: note = DNA
gcggcagaccaggcagtcgtt

SEQ ID NO: 1640 - DNA, 21 bp, synthetic construct
  misc_feature 1..21: note = Description of Artificial Sequence: Synthetic oligonucleotide
  source 1..21: mol_type = other DNA
  modified_base 1: mod_base = OTHER; note = 2'-O-Methyl nucleotide
  modified_base 2: mod_base = OTHER; note = 2'-O-Methyl nucleotide
  modified_base 3: mod_base = OTHER; note = 2'-fluoro nucleotide
  modified_base 4: mod_base = OTHER; note = 2'-O-Methyl nucleotide
  modified_base 5: mod_base = OTHER; note = 2'-fluoro nucleotide
  modified_base 6: mod_base = OTHER; note = 2'-O-Methyl nucleotide
  modified_base 7: mod_base = OTHER; note = 2'-fluoro nucleotide
  modified_base 8: mod_base = OTHER; note = 2'-O-Methyl nucleotide
  modified_base 9: mod_base = OTHER; note = 2'-fluoro nucleotide
  modified_base 10: mod_base = OTHER; note = 2'-O-Methyl nucleotide
  modified_base 11: mod_base = OTHER; note = 2'-fluoro nucleotide
  modified_base 12: mod_base = OTHER; note = 2'-O-Methyl nucleotide
  modified_base 13: mod_base = OTHER; note = 2'-fluoro nucleotide
  modified_base 14: mod_base = OTHER; note = 2'-O-Methyl nucleotide
  modified_base 15: mod_base = OTHER; note = 2'-fluoro nucleotide
  modified_base 16: mod_base = OTHER; note = 2'-O-Methyl nucleotide
  modified_base 17: mod_base = OTHER; note = 2'-fluoro nucleotide
  modified_base 18: mod_base = OTHER; note = 2'-O-Methyl nucleotide
  modified_base 19: mod_base = OTHER; note = 2'-fluoro nucleotide
  modified_base 20: mod_base = OTHER; note = deoxy-thymine phosphorothioate
  misc_feature 1..19: note = RNA
  misc_feature 20..21: note = DNA
gcctggtctgccgcaaatttt

SEQ ID NO: 1641 - DNA, 21 bp, synthetic construct
  misc_feature 1..21: note = Description of Artificial Sequence: Synthetic oligonucleotide
  source 1..21: mol_type = other DNA
  modified_base 1: mod_base = OTHER; note = 2'-fluoro nucleotide
  modified_base 2: mod_base = OTHER; note = 2'-fluoro nucleotide
  modified_base 3: mod_base = OTHER; note = 2'-O-Methyl nucleotide
  modified_base 4: mod_base = OTHER; note = 2'-fluoro nucleotide
  modified_base 5: mod_base = OTHER; note = 2'-O-Methyl nucleotide
  modified_base 6: mod_base = OTHER; note = 2'-fluoro nucleotide
  modified_base 7: mod_base = OTHER; note = 2'-O-Methyl nucleotide
  modified_base 8: mod_base = OTHER; note = 2'-fluoro nucleotide
  modified_base 9: mod_base = OTHER; note = 2'-O-Methyl nucleotide
  modified_base 10: mod_base = OTHER; note = 2'-fluoro nucleotide
  modified_base 11: mod_base = OTHER; note = 2'-O-Methyl nucleotide
  modified_base 12: mod_base = OTHER; note = 2'-fluoro nucleotide
  modified_base 13: mod_base = OTHER; note = 2'-O-Methyl nucleotide
  modified_base 14: mod_base = OTHER; note = 2'-fluoro nucleotide
  modified_base 15: mod_base = OTHER; note = 2'-O-Methyl nucleotide
  modified_base 16: mod_base = OTHER; note = 2'-fluoro nucleotide
  modified_base 17: mod_base = OTHER; note = 2'-O-Methyl nucleotide
  modified_base 18: mod_base = OTHER; note = 2'-fluoro nucleotide
  modified_base 19: mod_base = OTHER; note = 2'-O-Methyl nucleotide
  modified_base 20: mod_base = OTHER; note = deoxy-thymine phosphorothioate
  misc_feature 1..19: note = RNA
  misc_feature 20..21: note = DNA
aatttgcggcagaccaggctt

SEQ ID NO: 1642 - DNA, 21 bp, synthetic construct
  misc_feature 1..21: note = Description of Artificial Sequence: Synthetic oligonucleotide
  source 1..21: mol_type = other DNA
  modified_base 1: mod_base = OTHER; note = 2'-O-Methyl nucleotide
  modified_base 2: mod_base = OTHER; note = 2'-O-Methyl nucleotide
  modified_base 3: mod_base = OTHER; note = 2'-fluoro nucleotide
  modified_base 4: mod_base = OTHER; note = 2'-O-Methyl nucleotide
  modified_base 5: mod_base = OTHER; note = 2'-fluoro nucleotide
  modified_base 6: mod_base = OTHER; note = 2'-O-Methyl nucleotide
  modified_base 7: mod_base = OTHER; note = 2'-fluoro nucleotide
  modified_base 8: mod_base = OTHER; note = 2'-O-Methyl nucleotide
  modified_base 9: mod_base = OTHER; note = 2'-fluoro nucleotide
  modified_base 10: mod_base = OTHER; note = 2'-O-Methyl nucleotide
  modified_base 11: mod_base = OTHER; note = 2'-fluoro nucleotide
  modified_base 12: mod_base = OTHER; note = 2'-O-Methyl nucleotide
  modified_base 13: mod_base = OTHER; note = 2'-fluoro nucleotide
  modified_base 14: mod_base = OTHER; note = 2'-O-Methyl nucleotide
  modified_base 15: mod_base = OTHER; note = 2'-fluoro nucleotide
  modified_base 16: mod_base = OTHER; note = 2'-O-Methyl nucleotide
  modified_base 17: mod_base = OTHER; note = 2'-fluoro nucleotide
  modified_base 18: mod_base = OTHER; note = 2'-O-Methyl nucleotide
  modified_base 19: mod_base = OTHER; note = 2'-fluoro nucleotide
  modified_base 20: mod_base = OTHER; note = deoxy-thymine phosphorothioate
  misc_feature 1..19: note = RNA
  misc_feature 20..21: note = DNA
cctggtctgccgcaaattctt

SEQ ID NO: 1643 - DNA, 21 bp, synthetic construct
  misc_feature 1..21: note = Description of Artificial Sequence: Synthetic oligonucleotide
  source 1..21: mol_type = other DNA
  modified_base 1: mod_base = OTHER; note = 2'-fluoro nucleotide
  modified_base 2: mod_base = OTHER; note = 2'-fluoro nucleotide
  modified_base 3: mod_base = OTHER; note = 2'-O-Methyl nucleotide
  modified_base 4: mod_base = OTHER; note = 2'-fluoro nucleotide
  modified_base 5: mod_base = OTHER; note = 2'-O-Methyl nucleotide
  modified_base 6: mod_base = OTHER; note = 2'-fluoro nucleotide
  modified_base 7: mod_base = OTHER; note = 2'-O-Methyl nucleotide
  modified_base 8: mod_base = OTHER; note = 2'-fluoro nucleotide
  modified_base 9: mod_base = OTHER; note = 2'-O-Methyl nucleotide
  modified_base 10: mod_base = OTHER; note = 2'-fluoro nucleotide
  modified_base 11: mod_base = OTHER; note = 2'-O-Methyl nucleotide
  modified_base 12: mod_base = OTHER; note = 2'-fluoro nucleotide
  modified_base 13: mod_base = OTHER; note = 2'-O-Methyl nucleotide
  modified_base 14: mod_base = OTHER; note = 2'-fluoro nucleotide
  modified_base 15: mod_base = OTHER; note = 2'-O-Methyl nucleotide
  modified_base 16: mod_base = OTHER; note = 2'-fluoro nucleotide
  modified_base 17: mod_base = OTHER; note = 2'-O-Methyl nucleotide
  modified_base 18: mod_base = OTHER; note = 2'-fluoro nucleotide
  modified_base 19: mod_base = OTHER; note = 2'-O-Methyl nucleotide
  modified_base 20: mod_base = OTHER; note = deoxy-thymine phosphorothioate
  misc_feature 1..19: note = RNA
  misc_feature 20..21: note = DNA
gaatttgcggcagaccaggtt

SEQ ID NO: 1644 - DNA, 21 bp, synthetic construct
  misc_feature 1..21: note = Description of Artificial Sequence: Synthetic oligonucleotide
  source 1..21: mol_type = other DNA
  modified_base 1: mod_base = OTHER; note = 2'-O-Methyl nucleotide
  modified_base 2: mod_base = OTHER; note = 2'-O-Methyl nucleotide
  modified_base 3: mod_base = OTHER; note = 2'-fluoro nucleotide
  modified_base 4: mod_base = OTHER; note = 2'-O-Methyl nucleotide
  modified_base 5: mod_base = OTHER; note = 2'-fluoro nucleotide
  modified_base 6: mod_base = OTHER; note = 2'-O-Methyl nucleotide
  modified_base 7: mod_base = OTHER; note = 2'-fluoro nucleotide
  modified_base 8: mod_base = OTHER; note = 2'-O-Methyl nucleotide
  modified_base 9: mod_base = OTHER; note = 2'-fluoro nucleotide
  modified_base 10: mod_base = OTHER; note = 2'-O-Methyl nucleotide
  modified_base 11: mod_base = OTHER; note = 2'-fluoro nucleotide
  modified_base 12: mod_base = OTHER; note = 2'-O-Methyl nucleotide
  modified_base 13: mod_base = OTHER; note = 2'-fluoro nucleotide
  modified_base 14: mod_base = OTHER; note = 2'-O-Methyl nucleotide
  modified_base 15: mod_base = OTHER; note = 2'-fluoro nucleotide
  modified_base 16: mod_base = OTHER; note = 2'-O-Methyl nucleotide
  modified_base 17: mod_base = OTHER; note = 2'-fluoro nucleotide
  modified_base 18: mod_base = OTHER; note = 2'-O-Methyl nucleotide
  modified_base 19: mod_base = OTHER; note = 2'-fluoro nucleotide
  modified_base 20: mod_base = OTHER; note = deoxy-thymine phosphorothioate
  misc_feature 1..19: note = RNA
  misc_feature 20..21: note = DNA
ctggtctgccgcaaattcctt

SEQ ID NO: 1645 - DNA, 21 bp, synthetic construct
  misc_feature 1..21: note = Description of Artificial Sequence: Synthetic oligonucleotide
  source 1..21: mol_type = other DNA
  modified_base 1: mod_base = OTHER; note = 2'-fluoro nucleotide
  modified_base 2: mod_base = OTHER; note = 2'-fluoro nucleotide
  modified_base 3: mod_base = OTHER; note = 2'-O-Methyl nucleotide
  modified_base 4: mod_base = OTHER; note = 2'-fluoro nucleotide
  modified_base 5: mod_base = OTHER; note = 2'-O-Methyl nucleotide
  modified_base 6: mod_base = OTHER; note = 2'-fluoro nucleotide
  modified_base 7: mod_base = OTHER; note = 2'-O-Methyl nucleotide
  modified_base 8: mod_base = OTHER; note = 2'-fluoro nucleotide
  modified_base 9: mod_base = OTHER; note = 2'-O-Methyl nucleotide
  modified_base 10: mod_base = OTHER; note = 2'-fluoro nucleotide
  modified_base 11: mod_base = OTHER; note = 2'-O-Methyl nucleotide
  modified_base 12: mod_base = OTHER; note = 2'-fluoro nucleotide
  modified_base 13: mod_base = OTHER; note = 2'-O-Methyl nucleotide
  modified_base 14: mod_base = OTHER; note = 2'-fluoro nucleotide
  modified_base 15: mod_base = OTHER; note = 2'-O-Methyl nucleotide
  modified_base 16: mod_base = OTHER; note = 2'-fluoro nucleotide
  modified_base 17: mod_base = OTHER; note = 2'-O-Methyl nucleotide
  modified_base 18: mod_base = OTHER; note = 2'-fluoro nucleotide
  modified_base 19: mod_base = OTHER; note = 2'-O-Methyl nucleotide
  modified_base 20: mod_base = OTHER; note = deoxy-thymine phosphorothioate
  misc_feature 1..19: note = RNA
  misc_feature 20..21: note = DNA
ggaatttgcggcagaccagtt

SEQ ID NO: 1646 - DNA, 21 bp, synthetic construct
  misc_feature 1..21: note = Description of Artificial Sequence: Synthetic oligonucleotide
  source 1..21: mol_type = other DNA
  modified_base 1: mod_base = OTHER; note = 2'-O-Methyl nucleotide
  modified_base 2: mod_base = OTHER; note = 2'-O-Methyl nucleotide
  modified_base 3: mod_base = OTHER; note = 2'-fluoro nucleotide
  modified_base 4: mod_base = OTHER; note = 2'-O-Methyl nucleotide
  modified_base 5: mod_base = OTHER; note = 2'-fluoro nucleotide
  modified_base 6: mod_base = OTHER; note = 2'-O-Methyl nucleotide
  modified_base 7: mod_base = OTHER; note = 2'-fluoro nucleotide
  modified_base 8: mod_base = OTHER; note = 2'-O-Methyl nucleotide
  modified_base 9: mod_base = OTHER; note = 2'-fluoro nucleotide
  modified_base 10: mod_base = OTHER; note = 2'-O-Methyl nucleotide
  modified_base 11: mod_base = OTHER; note = 2'-fluoro nucleotide
  modified_base 12: mod_base = OTHER; note = 2'-O-Methyl nucleotide
  modified_base 13: mod_base = OTHER; note = 2'-fluoro nucleotide
  modified_base 14: mod_base = OTHER; note = 2'-O-Methyl nucleotide
  modified_base 15: mod_base = OTHER; note = 2'-fluoro nucleotide
  modified_base 16: mod_base = OTHER; note = 2'-O-Methyl nucleotide
  modified_base 17: mod_base = OTHER; note = 2'-fluoro nucleotide
  modified_base 18: mod_base = OTHER; note = 2'-O-Methyl nucleotide
  modified_base 19: mod_base = OTHER; note = 2'-fluoro nucleotide
  modified_base 20: mod_base = OTHER; note = deoxy-thymine phosphorothioate
  misc_feature 1..19: note = RNA
  misc_feature 20..21: note = DNA
tggtctgccgcaaattccgtt

SEQ ID NO: 1647 - DNA, 21 bp, synthetic construct
  misc_feature 1..21: note = Description of Artificial Sequence: Synthetic oligonucleotide
  source 1..21: mol_type = other DNA
  modified_base 1: mod_base = OTHER; note = 2'-fluoro nucleotide
  modified_base 2: mod_base = OTHER; note = 2'-fluoro nucleotide
  modified_base 3: mod_base = OTHER; note = 2'-O-Methyl nucleotide
  modified_base 4: mod_base = OTHER; note = 2'-fluoro nucleotide
  modified_base 5: mod_base = OTHER; note = 2'-O-Methyl nucleotide
  modified_base 6: mod_base = OTHER; note = 2'-fluoro nucleotide
  modified_base 7: mod_base = OTHER; note = 2'-O-Methyl nucleotide
  modified_base 8: mod_base = OTHER; note = 2'-fluoro nucleotide
  modified_base 9: mod_base = OTHER; note = 2'-O-Methyl nucleotide
  modified_base 10: mod_base = OTHER; note = 2'-fluoro nucleotide
  modified_base 11: mod_base = OTHER; note = 2'-O-Methyl nucleotide
  modified_base 12: mod_base = OTHER; note = 2'-fluoro nucleotide
  modified_base 13: mod_base = OTHER; note = 2'-O-Methyl nucleotide
  modified_base 14: mod_base = OTHER; note = 2'-fluoro nucleotide
  modified_base 15: mod_base = OTHER; note = 2'-O-Methyl nucleotide
  modified_base 16: mod_base = OTHER; note = 2'-fluoro nucleotide
  modified_base 17: mod_base = OTHER; note = 2'-O-Methyl nucleotide
  modified_base 18: mod_base = OTHER; note = 2'-fluoro nucleotide
  modified_base 19: mod_base = OTHER; note = 2'-O-Methyl nucleotide
  modified_base 20: mod_base = OTHER; note = deoxy-thymine phosphorothioate
  misc_feature 1..19: note = RNA
  misc_feature 20..21: note = DNA
cggaatttgcggcagaccatt

SEQ ID NO: 1648 - DNA, 21 bp, synthetic construct
  misc_feature 1..21: note = Description of Artificial Sequence: Synthetic oligonucleotide
  source 1..21: mol_type = other DNA
  modified_base 1: mod_base = OTHER; note = 2'-O-Methyl nucleotide
  modified_base 2: mod_base = OTHER; note = 2'-O-Methyl nucleotide
  modified_base 3: mod_base = OTHER; note = 2'-fluoro nucleotide
  modified_base 4: mod_base = OTHER; note = 2'-O-Methyl nucleotide
  modified_base 5: mod_base = OTHER; note = 2'-fluoro nucleotide
  modified_base 6: mod_base = OTHER; note = 2'-O-Methyl nucleotide
  modified_base 7: mod_base = OTHER; note = 2'-fluoro nucleotide
  modified_base 8: mod_base = OTHER; note = 2'-O-Methyl nucleotide
  modified_base 9: mod_base = OTHER; note = 2'-fluoro nucleotide
  modified_base 10: mod_base = OTHER; note = 2'-O-Methyl nucleotide
  modified_base 11: mod_base = OTHER; note = 2'-fluoro nucleotide
  modified_base 12: mod_base = OTHER; note = 2'-O-Methyl nucleotide
  modified_base 13: mod_base = OTHER; note = 2'-fluoro nucleotide
  modified_base 14: mod_base = OTHER; note = 2'-O-Methyl nucleotide
  modified_base 15: mod_base = OTHER; note = 2'-fluoro nucleotide
  modified_base 16: mod_base = OTHER; note = 2'-O-Methyl nucleotide
  modified_base 17: mod_base = OTHER; note = 2'-fluoro nucleotide
  modified_base 18: mod_base = OTHER; note = 2'-O-Methyl nucleotide
  modified_base 19: mod_base = OTHER; note = 2'-fluoro nucleotide
  modified_base 20: mod_base = OTHER; note = deoxy-thymine phosphorothioate
  misc_feature 1..19: note = RNA
  misc_feature 20..21: note = DNA
gtctgccgcaaattccgagtt

SEQ ID NO: 1649 - DNA, 21 bp, synthetic construct
  misc_feature 1..21: note = Description of Artificial Sequence: Synthetic oligonucleotide
  source 1..21: mol_type = other DNA
  modified_base 1: mod_base = OTHER; note = 2'-fluoro nucleotide
  modified_base 2: mod_base = OTHER; note = 2'-fluoro nucleotide
  modified_base 3: mod_base = OTHER; note = 2'-O-Methyl nucleotide
  modified_base 4: mod_base = OTHER; note = 2'-fluoro nucleotide
  modified_base 5: mod_base = OTHER; note = 2'-O-Methyl nucleotide
  modified_base 6: mod_base = OTHER; note = 2'-fluoro nucleotide
  modified_base 7: mod_base = OTHER; note = 2'-O-Methyl nucleotide
  modified_base 8: mod_base = OTHER; note = 2'-fluoro nucleotide
  modified_base 9: mod_base = OTHER; note = 2'-O-Methyl nucleotide
  modified_base 10: mod_base = OTHER; note = 2'-fluoro nucleotide
  modified_base 11: mod_base = OTHER; note = 2'-O-Methyl nucleotide
  modified_base 12: mod_base = OTHER; note = 2'-fluoro nucleotide
  modified_base 13: mod_base = OTHER; note = 2'-O-Methyl nucleotide
  modified_base 14: mod_base = OTHER; note = 2'-fluoro nucleotide
  modified_base 15: mod_base = OTHER; note = 2'-O-Methyl nucleotide
  modified_base 16: mod_base = OTHER; note = 2'-fluoro nucleotide
  modified_base 17: mod_base = OTHER; note = 2'-O-Methyl nucleotide
  modified_base 18: mod_base = OTHER; note = 2'-fluoro nucleotide
  modified_base 19: mod_base = OTHER; note = 2'-O-Methyl nucleotide
  modified_base 20: mod_base = OTHER; note = deoxy-thymine phosphorothioate
  misc_feature 1..19: note = RNA
  misc_feature 20..21: note = DNA
ctcggaatttgcggcagactt

SEQ ID NO: 1650 - DNA, 21 bp, synthetic construct
  misc_feature 1..21: note = Description of Artificial Sequence: Synthetic oligonucleotide
  source 1..21: mol_type = other DNA
  modified_base 1: mod_base = OTHER; note = 2'-O-Methyl nucleotide
  modified_base 2: mod_base = OTHER; note = 2'-O-Methyl nucleotide
  modified_base 3: mod_base = OTHER; note = 2'-fluoro nucleotide
  modified_base 4: mod_base = OTHER; note = 2'-O-Methyl nucleotide
  modified_base 5: mod_base = OTHER; note = 2'-fluoro nucleotide
  modified_base 6: mod_base = OTHER; note = 2'-O-Methyl nucleotide
  modified_base 7: mod_base = OTHER; note = 2'-fluoro nucleotide
  modified_base 8: mod_base = OTHER; note = 2'-O-Methyl nucleotide
  modified_base 9: mod_base = OTHER; note = 2'-fluoro nucleotide
  modified_base 10: mod_base = OTHER; note = 2'-O-Methyl nucleotide
  modified_base 11: mod_base = OTHER; note = 2'-fluoro nucleotide
  modified_base 12: mod_base = OTHER; note = 2'-O-Methyl nucleotide
  modified_base 13: mod_base = OTHER; note = 2'-fluoro nucleotide
  modified_base 14: mod_base = OTHER; note = 2'-O-Methyl nucleotide
  modified_base 15: mod_base = OTHER; note = 2'-fluoro nucleotide
  modified_base 16: mod_base = OTHER; note = 2'-O-Methyl nucleotide
  modified_base 17: mod_base = OTHER; note = 2'-fluoro nucleotide
  modified_base 18: mod_base = OTHER; note = 2'-O-Methyl nucleotide
  modified_base 19: mod_base = OTHER; note = 2'-fluoro nucleotide
  modified_base 20: mod_base = OTHER; note = deoxy-thymine phosphorothioate
  misc_feature 1..19: note = RNA
  misc_feature 20..21: note = DNA
tctgccgcaaattccgagatt

SEQ ID NO: 1651 - DNA, 21 bp, synthetic construct
  misc_feature 1..21: note = Description of Artificial Sequence: Synthetic oligonucleotide
  source 1..21: mol_type = other DNA
  modified_base 1: mod_base = OTHER; note = 2'-fluoro nucleotide
  modified_base 2: mod_base = OTHER; note = 2'-fluoro nucleotide
  modified_base 3: mod_base = OTHER; note = 2'-O-Methyl nucleotide
  modified_base 4: mod_base = OTHER; note = 2'-fluoro nucleotide
  modified_base 5: mod_base = OTHER; note = 2'-O-Methyl nucleotide
  modified_base 6: mod_base = OTHER; note = 2'-fluoro nucleotide
  modified_base 7: mod_base = OTHER; note = 2'-O-Methyl nucleotide
  modified_base 8: mod_base = OTHER; note = 2'-fluoro nucleotide
  modified_base 9: mod_base = OTHER; note = 2'-O-Methyl nucleotide
  modified_base 10: mod_base = OTHER; note = 2'-fluoro nucleotide
  modified_base 11: mod_base = OTHER; note = 2'-O-Methyl nucleotide
  modified_base 12: mod_base = OTHER; note = 2'-fluoro nucleotide
  modified_base 13: mod_base = OTHER; note = 2'-O-Methyl nucleotide
  modified_base 14: mod_base = OTHER; note = 2'-fluoro nucleotide
  modified_base 15: mod_base = OTHER; note = 2'-O-Methyl nucleotide
  modified_base 16: mod_base = OTHER; note = 2'-fluoro nucleotide
  modified_base 17: mod_base = OTHER; note = 2'-O-Methyl nucleotide
  modified_base 18: mod_base = OTHER; note = 2'-fluoro nucleotide
  modified_base 19: mod_base = OTHER; note = 2'-O-Methyl nucleotide
  modified_base 20: mod_base = OTHER; note = deoxy-thymine phosphorothioate
  misc_feature 1..19: note = RNA
  misc_feature 20..21: note = DNA
tctcggaatttgcggcagatt

SEQ ID NO: 1652 - DNA, 21 bp, synthetic construct
  misc_feature 1..21: note = Description of Artificial Sequence: Synthetic oligonucleotide
  source 1..21: mol_type = other DNA
  modified_base 1: mod_base = OTHER; note = 2'-O-Methyl nucleotide
  modified_base 2: mod_base = OTHER; note = 2'-O-Methyl nucleotide
  modified_base 3: mod_base = OTHER; note = 2'-fluoro nucleotide
  modified_base 4: mod_base = OTHER; note = 2'-O-Methyl nucleotide
  modified_base 5: mod_base = OTHER; note = 2'-fluoro nucleotide
  modified_base 6: mod_base = OTHER; note = 2'-O-Methyl nucleotide
  modified_base 7: mod_base = OTHER; note = 2'-fluoro nucleotide
  modified_base 8: mod_base = OTHER; note = 2'-O-Methyl nucleotide
  modified_base 9: mod_base = OTHER; note = 2'-fluoro nucleotide
  modified_base 10: mod_base = OTHER; note = 2'-O-Methyl nucleotide
  modified_base 11: mod_base = OTHER; note = 2'-fluoro nucleotide
  modified_base 12: mod_base = OTHER; note = 2'-O-Methyl nucleotide
  modified_base 13: mod_base = OTHER; note = 2'-fluoro nucleotide
  modified_base 14: mod_base = OTHER; note = 2'-O-Methyl nucleotide
  modified_base 15: mod_base = OTHER; note = 2'-fluoro nucleotide
  modified_base 16: mod_base = OTHER; note = 2'-O-Methyl nucleotide
  modified_base 17: mod_base = OTHER; note = 2'-fluoro nucleotide
  modified_base 18: mod_base = OTHER; note = 2'-O-Methyl nucleotide
  modified_base 19: mod_base = OTHER; note = 2'-fluoro nucleotide
  modified_base 20: mod_base = OTHER; note = deoxy-thymine phosphorothioate
  misc_feature 1..19: note = RNA
  misc_feature 20..21: note = DNA
ctgccgcaaattccgagactt

SEQ ID NO: 1653 - DNA, 21 bp, synthetic construct
  misc_feature 1..21: note = Description of Artificial Sequence: Synthetic oligonucleotide
  source 1..21: mol_type = other DNA
  modified_base 1: mod_base = OTHER; note = 2'-fluoro nucleotide
  modified_base 2: mod_base = OTHER; note = 2'-fluoro nucleotide
  modified_base 3: mod_base = OTHER; note = 2'-O-Methyl nucleotide
  modified_base 4: mod_base = OTHER; note = 2'-fluoro nucleotide
  modified_base 5: mod_base = OTHER; note = 2'-O-Methyl nucleotide
  modified_base 6: mod_base = OTHER; note = 2'-fluoro nucleotide
  modified_base 7: mod_base = OTHER; note = 2'-O-Methyl nucleotide
  modified_base 8: mod_base = OTHER; note = 2'-fluoro nucleotide
  modified_base 9: mod_base = OTHER; note = 2'-O-Methyl nucleotide
  modified_base 10: mod_base = OTHER; note = 2'-fluoro nucleotide
  modified_base 11: mod_base = OTHER; note = 2'-O-Methyl nucleotide
  modified_base 12: mod_base = OTHER; note = 2'-fluoro nucleotide
  modified_base 13: mod_base = OTHER; note = 2'-O-Methyl nucleotide
  modified_base 14: mod_base = OTHER; note = 2'-fluoro nucleotide
  modified_base 15: mod_base = OTHER; note = 2'-O-Methyl nucleotide
  modified_base 16: mod_base = OTHER; note = 2'-fluoro nucleotide
  modified_base 17: mod_base = OTHER; note = 2'-O-Methyl nucleotide
  modified_base 18: mod_base = OTHER; note = 2'-fluoro nucleotide
  modified_base 19: mod_base = OTHER; note = 2'-O-Methyl nucleotide
  modified_base 20: mod_base = OTHER; note = deoxy-thymine phosphorothioate
  misc_feature 1..19: note = RNA
  misc_feature 20..21: note = DNA
gtctcggaatttgcggcagtt

SEQ ID NO: 1654 - DNA, 21 bp, synthetic construct
  misc_feature 1..21: note = Description of Artificial Sequence: Synthetic oligonucleotide
  source 1..21: mol_type = other DNA
  modified_base 1: mod_base = OTHER; note = 2'-O-Methyl nucleotide
  modified_base 2: mod_base = OTHER; note = 2'-O-Methyl nucleotide
  modified_base 3: mod_base = OTHER; note = 2'-fluoro nucleotide
  modified_base 4: mod_base = OTHER; note = 2'-O-Methyl nucleotide
  modified_base 5: mod_base = OTHER; note = 2'-fluoro nucleotide
  modified_base 6: mod_base = OTHER; note = 2'-O-Methyl nucleotide
  modified_base 7: mod_base = OTHER; note = 2'-fluoro nucleotide
  modified_base 8: mod_base = OTHER; note = 2'-O-Methyl nucleotide
  modified_base 9: mod_base = OTHER; note = 2'-fluoro nucleotide
  modified_base 10: mod_base = OTHER; note = 2'-O-Methyl nucleotide
  modified_base 11: mod_base = OTHER; note = 2'-fluoro nucleotide
  modified_base 12: mod_base = OTHER; note = 2'-O-Methyl nucleotide
  modified_base 13: mod_base = OTHER; note = 2'-fluoro nucleotide
  modified_base 14: mod_base = OTHER; note = 2'-O-Methyl nucleotide
  modified_base 15: mod_base = OTHER; note = 2'-fluoro nucleotide
  modified_base 16: mod_base = OTHER; note = 2'-O-Methyl nucleotide
  modified_base 17: mod_base = OTHER; note = 2'-fluoro nucleotide
  modified_base 18: mod_base = OTHER; note = 2'-O-Methyl nucleotide
  modified_base 19: mod_base = OTHER; note = 2'-fluoro nucleotide
  modified_base 20: mod_base = OTHER; note = deoxy-thymine phosphorothioate
  misc_feature 1..19: note = RNA
  misc_feature 20..21: note = DNA
tgccgcaaattccgagacgtt

SEQ ID NO: 1655 - DNA, 21 bp, synthetic construct
  misc_feature 1..21: note = Description of Artificial Sequence: Synthetic oligonucleotide
  source 1..21: mol_type = other DNA
  modified_base 1: mod_base = OTHER; note = 2'-fluoro nucleotide
  modified_base 2: mod_base = OTHER; note = 2'-fluoro nucleotide
  modified_base 3: mod_base = OTHER; note = 2'-O-Methyl nucleotide
  modified_base 4: mod_base = OTHER; note = 2'-fluoro nucleotide
  modified_base 5: mod_base = OTHER; note = 2'-O-Methyl nucleotide
  modified_base 6: mod_base = OTHER; note = 2'-fluoro nucleotide
  modified_base 7: mod_base = OTHER; note = 2'-O-Methyl nucleotide
  modified_base 8: mod_base = OTHER; note = 2'-fluoro nucleotide
  modified_base 9: mod_base = OTHER; note = 2'-O-Methyl nucleotide
  modified_base 10: mod_base = OTHER; note = 2'-fluoro nucleotide
  modified_base 11: mod_base = OTHER; note = 2'-O-Methyl nucleotide
  modified_base 12: mod_base = OTHER; note = 2'-fluoro nucleotide
  modified_base 13: mod_base = OTHER; note = 2'-O-Methyl nucleotide
  modified_base 14: mod_base = OTHER; note = 2'-fluoro nucleotide
  modified_base 15: mod_base = OTHER; note = 2'-O-Methyl nucleotide
  modified_base 16: mod_base = OTHER; note = 2'-fluoro nucleotide
  modified_base 17: mod_base = OTHER; note = 2'-O-Methyl nucleotide
  modified_base 18: mod_base = OTHER; note = 2'-fluoro nucleotide
  modified_base 19: mod_base = OTHER; note = 2'-O-Methyl nucleotide
  modified_base 20: mod_base = OTHER; note = deoxy-thymine phosphorothioate
  misc_feature 1..19: note = RNA
  misc_feature 20..21: note = DNA
cgtctcggaatttgcggcatt

SEQ ID NO: 1656 - DNA, 21 bp, synthetic construct
  misc_feature 1..21: note = Description of Artificial Sequence: Synthetic oligonucleotide
  source 1..21: mol_type = other DNA
  modified_base 1: mod_base = OTHER; note = 2'-O-Methyl nucleotide
  modified_base 2: mod_base = OTHER; note = 2'-O-Methyl nucleotide
  modified_base 3: mod_base = OTHER; note = 2'-fluoro nucleotide
  modified_base 4: mod_base = OTHER; note = 2'-O-Methyl nucleotide
  modified_base 5: mod_base = OTHER; note = 2'-fluoro nucleotide
  modified_base 6: mod_base = OTHER; note = 2'-O-Methyl nucleotide
  modified_base 7: mod_base = OTHER; note = 2'-fluoro nucleotide
  modified_base 8: mod_base = OTHER; note = 2'-O-Methyl nucleotide
  modified_base 9: mod_base = OTHER; note = 2'-fluoro nucleotide
  modified_base 10: mod_base = OTHER; note = 2'-O-Methyl nucleotide
  modified_base 11: mod_base = OTHER; note = 2'-fluoro nucleotide
  modified_base 12: mod_base = OTHER; note = 2'-O-Methyl nucleotide
  modified_base 13: mod_base = OTHER; note = 2'-fluoro nucleotide
  modified_base 14: mod_base = OTHER; note = 2'-O-Methyl nucleotide
  modified_base 15: mod_base = OTHER; note = 2'-fluoro nucleotide
  modified_base 16: mod_base = OTHER; note = 2'-O-Methyl nucleotide
  modified_base 17: mod_base = OTHER; note = 2'-fluoro nucleotide
  modified_base 18: mod_base = OTHER; note = 2'-O-Methyl nucleotide
  modified_base 19: mod_base = OTHER; note = 2'-fluoro nucleotide
  modified_base 20: mod_base = OTHER; note = deoxy-thymine phosphorothioate
  misc_feature 1..19: note = RNA
  misc_feature 20..21: note = DNA
ccgcaaattccgagacgaatt

SEQ ID NO: 1657 - DNA, 21 bp, synthetic construct
  misc_feature 1..21: note = Description of Artificial Sequence: Synthetic oligonucleotide
  source 1..21: mol_type = other DNA
  modified_base 1: mod_base = OTHER; note = 2'-fluoro nucleotide
  modified_base 2: mod_base = OTHER; note = 2'-fluoro nucleotide
  modified_base 3: mod_base = OTHER; note = 2'-O-Methyl nucleotide
  modified_base 4: mod_base = OTHER; note = 2'-fluoro nucleotide
  modified_base 5: mod_base = OTHER; note = 2'-O-Methyl nucleotide
  modified_base 6: mod_base = OTHER; note = 2'-fluoro nucleotide
  modified_base 7: mod_base = OTHER; note = 2'-O-Methyl nucleotide
  modified_base 8: mod_base = OTHER; note = 2'-fluoro nucleotide
  modified_base 9: mod_base = OTHER; note = 2'-O-Methyl nucleotide
  modified_base 10: mod_base = OTHER; note = 2'-fluoro nucleotide
  modified_base 11: mod_base = OTHER; note = 2'-O-Methyl nucleotide
  modified_base 12: mod_base = OTHER; note = 2'-fluoro nucleotide
  modified_base 13: mod_base = OTHER; note = 2'-O-Methyl nucleotide
  modified_base 14: mod_base = OTHER; note = 2'-fluoro nucleotide
  modified_base 15: mod_base = OTHER; note = 2'-O-Methyl nucleotide
  modified_base 16: mod_base = OTHER; note = 2'-fluoro nucleotide
  modified_base 17: mod_base = OTHER; note = 2'-O-Methyl nucleotide
  modified_base 18: mod_base = OTHER; note = 2'-fluoro nucleotide
  modified_base 19: mod_base = OTHER; note = 2'-O-Methyl nucleotide
  modified_base 20: mod_base = OTHER; note = deoxy-thymine phosphorothioate
  misc_feature 1..19: note = RNA
  misc_feature 20..21: note = DNA
ttcgtctcggaatttgcggtt

SEQ ID NO: 1658 - DNA, 21 bp, synthetic construct
  misc_feature 1..21: note = Description of Artificial Sequence: Synthetic oligonucleotide
  source 1..21: mol_type = other DNA
  modified_base 1: mod_base = OTHER; note = 2'-O-Methyl nucleotide
  modified_base 2: mod_base = OTHER; note = 2'-O-Methyl nucleotide
  modified_base 3: mod_base = OTHER; note = 2'-fluoro nucleotide
  modified_base 4: mod_base = OTHER; note = 2'-O-Methyl nucleotide
  modified_base 5: mod_base = OTHER; note = 2'-fluoro nucleotide
  modified_base 6: mod_base = OTHER; note = 2'-O-Methyl nucleotide
  modified_base 7: mod_base = OTHER; note = 2'-fluoro nucleotide
  modified_base 8: mod_base = OTHER; note = 2'-O-Methyl nucleotide
  modified_base 9: mod_base = OTHER; note = 2'-fluoro nucleotide
  modified_base 10: mod_base = OTHER; note = 2'-O-Methyl nucleotide
  modified_base 11: mod_base = OTHER; note = 2'-fluoro nucleotide
  modified_base 12: mod_base = OTHER; note = 2'-O-Methyl nucleotide
  modified_base 13: mod_base = OTHER; note = 2'-fluoro nucleotide
  modified_base 14: mod_base = OTHER; note = 2'-O-Methyl nucleotide
  modified_base 15: mod_base = OTHER; note = 2'-fluoro nucleotide
  modified_base 16: mod_base = OTHER; note = 2'-O-Methyl nucleotide
  modified_base 17: mod_base = OTHER; note = 2'-fluoro nucleotide
  modified_base 18: mod_base = OTHER; note = 2'-O-Methyl nucleotide
  modified_base 19: mod_base = OTHER; note = 2'-fluoro nucleotide
  modified_base 20: mod_base = OTHER; note = deoxy-thymine phosphorothioate
  misc_feature 1..19: note = RNA
  misc_feature 20..21: note = DNA
aattccgagacgaagccactt

SEQ ID NO: 1659 - DNA, 21 bp, synthetic construct
  misc_feature 1..21: note = Description of Artificial Sequence: Synthetic oligonucleotide
  source 1..21: mol_type = other DNA
  modified_base 1: mod_base = OTHER; note = 2'-fluoro nucleotide
  modified_base 2: mod_base = OTHER; note = 2'-fluoro nucleotide
  modified_base 3: mod_base = OTHER; note = 2'-O-Methyl nucleotide
  modified_base 4: mod_base = OTHER; note = 2'-fluoro nucleotide
  modified_base 5: mod_base = OTHER; note = 2'-O-Methyl nucleotide
  modified_base 6: mod_base = OTHER; note = 2'-fluoro nucleotide
  modified_base 7: mod_base = OTHER; note = 2'-O-Methyl nucleotide
  modified_base 8: mod_base = OTHER; note = 2'-fluoro nucleotide
  modified_base 9: mod_base = OTHER; note = 2'-O-Methyl nucleotide
  modified_base 10: mod_base = OTHER; note = 2'-fluoro nucleotide
  modified_base 11: mod_base = OTHER; note = 2'-O-Methyl nucleotide
  modified_base 12: mod_base = OTHER; note = 2'-fluoro nucleotide
  modified_base 13: mod_base = OTHER; note = 2'-O-Methyl nucleotide
  modified_base 14: mod_base = OTHER; note = 2'-fluoro nucleotide
  modified_base 15: mod_base = OTHER; note = 2'-O-Methyl nucleotide
  modified_base 16: mod_base = OTHER; note = 2'-fluoro nucleotide
  modified_base 17: mod_base = OTHER; note = 2'-O-Methyl nucleotide
  modified_base 18: mod_base = OTHER; note = 2'-fluoro nucleotide
  modified_base 19: mod_base = OTHER; note = 2'-O-Methyl nucleotide
  modified_base 20: mod_base = OTHER; note = deoxy-thymine phosphorothioate
  misc_feature 1..19: note = RNA
  misc_feature 20..21: note = DNA
gtggcttcgtctcggaatttt

SEQ ID NO: 1660 - DNA, 21 bp, synthetic construct
  misc_feature 1..21: note = Description of Artificial Sequence: Synthetic oligonucleotide
  source 1..21: mol_type = other DNA
  modified_base 1: mod_base = OTHER; note = 2'-O-Methyl nucleotide
  modified_base 2: mod_base = OTHER; note = 2'-O-Methyl nucleotide
  modified_base 3: mod_base = OTHER; note = 2'-fluoro nucleotide
  modified_base 4: mod_base = OTHER; note = 2'-O-Methyl nucleotide
  modified_base 5: mod_base = OTHER; note = 2'-fluoro nucleotide
  modified_base 6: mod_base = OTHER; note = 2'-O-Methyl nucleotide
  modified_base 7: mod_base = OTHER; note = 2'-fluoro nucleotide
  modified_base 8: mod_base = OTHER; note = 2'-O-Methyl nucleotide
  modified_base 9: mod_base = OTHER; note = 2'-fluoro nucleotide
  modified_base 10: mod_base = OTHER; note = 2'-O-Methyl nucleotide
  modified_base 11: mod_base = OTHER; note = 2'-fluoro nucleotide
  modified_base 12: mod_base = OTHER; note = 2'-O-Methyl nucleotide
  modified_base 13: mod_base = OTHER; note = 2'-fluoro nucleotide
  modified_base 14: mod_base = OTHER; note = 2'-O-Methyl nucleotide
  modified_base 15: mod_base = OTHER; note = 2'-fluoro nucleotide
  modified_base 16: mod_base = OTHER; note = 2'-O-Methyl nucleotide
  modified_base 17: mod_base = OTHER; note = 2'-fluoro nucleotide
  modified_base 18: mod_base = OTHER; note = 2'-O-Methyl nucleotide
  modified_base 19: mod_base = OTHER; note = 2'-fluoro nucleotide
  modified_base 20: mod_base = OTHER; note = deoxy-thymine phosphorothioate
  misc_feature 1..19: note = RNA
  misc_feature 20..21: note = DNA
attccgagacgaagccacgtt

SEQ ID NO: 1661 - DNA, 21 bp, synthetic construct
  misc_feature 1..21: note = Description of Artificial Sequence: Synthetic oligonucleotide
  source 1..21: mol_type = other DNA
  modified_base 1: mod_base = OTHER; note = 2'-fluoro nucleotide
  modified_base 2: mod_base = OTHER; note = 2'-fluoro nucleotide
  modified_base 3: mod_base = OTHER; note = 2'-O-Methyl nucleotide
  modified_base 4: mod_base = OTHER; note = 2'-fluoro nucleotide
  modified_base 5: mod_base = OTHER; note = 2'-O-Methyl nucleotide
  modified_base 6: mod_base = OTHER; note = 2'-fluoro nucleotide
  modified_base 7: mod_base = OTHER; note = 2'-O-Methyl nucleotide
  modified_base 8: mod_base = OTHER; note = 2'-fluoro nucleotide
  modified_base 9: mod_base = OTHER; note = 2'-O-Methyl nucleotide
  modified_base 10: mod_base = OTHER; note = 2'-fluoro nucleotide
  modified_base 11: mod_base = OTHER; note = 2'-O-Methyl nucleotide
  modified_base 12: mod_base = OTHER; note = 2'-fluoro nucleotide
  modified_base 13: mod_base = OTHER; note = 2'-O-Methyl nucleotide
  modified_base 14: mod_base = OTHER; note = 2'-fluoro nucleotide
  modified_base 15: mod_base = OTHER; note = 2'-O-Methyl nucleotide
  modified_base 16: mod_base = OTHER; note = 2'-fluoro nucleotide
  modified_base 17: mod_base = OTHER; note = 2'-O-Methyl nucleotide
  modified_base 18: mod_base = OTHER; note = 2'-fluoro nucleotide
  modified_base 19: mod_base = OTHER; note = 2'-O-Methyl nucleotide
  modified_base 20: mod_base = OTHER; note = deoxy-thymine phosphorothioate
  misc_feature 1..19: note = RNA
  misc_feature 20..21: note = DNA
cgtggcttcgtctcggaattt

SEQ ID NO: 1662 - DNA, 21 bp, synthetic construct
  misc_feature 1..21: note = Description of Artificial Sequence: Synthetic oligonucleotide
  source 1..21: mol_type = other DNA
  modified_base 1: mod_base = OTHER; note = 2'-O-Methyl nucleotide
  modified_base 2: mod_base = OTHER; note = 2'-O-Methyl nucleotide
  modified_base 3: mod_base = OTHER; note = 2'-fluoro nucleotide
  modified_base 4: mod_base = OTHER; note = 2'-O-Methyl nucleotide
  modified_base 5: mod_base = OTHER; note = 2'-fluoro nucleotide
  modified_base 6: mod_base = OTHER; note = 2'-O-Methyl nucleotide
  modified_base 7: mod_base = OTHER; note = 2'-fluoro nucleotide
  modified_base 8: mod_base = OTHER; note = 2'-O-Methyl nucleotide
  modified_base 9: mod_base = OTHER; note = 2'-fluoro nucleotide
  modified_base 10: mod_base = OTHER; note = 2'-O-Methyl nucleotide
  modified_base 11: mod_base = OTHER; note = 2'-fluoro nucleotide
  modified_base 12: mod_base = OTHER; note = 2'-O-Methyl nucleotide
  modified_base 13: mod_base = OTHER; note = 2'-fluoro nucleotide
  modified_base 14: mod_base = OTHER; note = 2'-O-Methyl nucleotide
  modified_base 15: mod_base = OTHER; note = 2'-fluoro nucleotide
  modified_base 16: mod_base = OTHER; note = 2'-O-Methyl nucleotide
  modified_base 17: mod_base = OTHER; note = 2'-fluoro nucleotide
  modified_base 18: mod_base = OTHER; note = 2'-O-Methyl nucleotide
  modified_base 19: mod_base = OTHER; note = 2'-fluoro nucleotide
  modified_base 20: mod_base = OTHER; note = deoxy-thymine phosphorothioate
  misc_feature 1..19: note = RNA
  misc_feature 20..21: note = DNA
ttccgagacgaagccacgttt

SEQ ID NO: 1663 - DNA, 21 bp, synthetic construct
  misc_feature 1..21: note = Description of Artificial Sequence: Synthetic oligonucleotide
  source 1..21: mol_type = other DNA
  modified_base 1: mod_base = OTHER; note = 2'-fluoro nucleotide
  modified_base 2: mod_base = OTHER; note = 2'-fluoro nucleotide
  modified_base 3: mod_base = OTHER; note = 2'-O-Methyl nucleotide
  modified_base 4: mod_base = OTHER; note = 2'-fluoro nucleotide
  modified_base 5: mod_base = OTHER; note = 2'-O-Methyl nucleotide
  modified_base 6: mod_base = OTHER; note = 2'-fluoro nucleotide
  modified_base 7: mod_base = OTHER; note = 2'-O-Methyl nucleotide
  modified_base 8: mod_base = OTHER; note = 2'-fluoro nucleotide
  modified_base 9: mod_base = OTHER; note = 2'-O-Methyl nucleotide
  modified_base 10: mod_base = OTHER; note = 2'-fluoro nucleotide
  modified_base 11: mod_base = OTHER; note = 2'-O-Methyl nucleotide
  modified_base 12: mod_base = OTHER; note = 2'-fluoro nucleotide
  modified_base 13: mod_base = OTHER; note = 2'-O-Methyl nucleotide
  modified_base 14: mod_base = OTHER; note = 2'-fluoro nucleotide
  modified_base 15: mod_base = OTHER; note = 2'-O-Methyl nucleotide
  modified_base 16: mod_base = OTHER; note = 2'-fluoro nucleotide
  modified_base 17: mod_base = OTHER; note = 2'-O-Methyl nucleotide
  modified_base 18: mod_base = OTHER; note = 2'-fluoro nucleotide
  modified_base 19: mod_base = OTHER; note = 2'-O-Methyl nucleotide
  modified_base 20: mod_base = OTHER; note = deoxy-thymine phosphorothioate
  misc_feature 1..19: note = RNA
  misc_feature 20..21: note = DNA
acgtggcttcgtctcggaatt

SEQ ID NO: 1664 - DNA, 21 bp, synthetic construct
  misc_feature 1..21: note = Description of Artificial Sequence: Synthetic oligonucleotide
  source 1..21: mol_type = other DNA
  modified_base 1: mod_base = OTHER; note = 2'-O-Methyl nucleotide
  modified_base 2: mod_base = OTHER; note = 2'-O-Methyl nucleotide
  modified_base 3: mod_base = OTHER; note = 2'-fluoro nucleotide
  modified_base 4: mod_base = OTHER; note = 2'-O-Methyl nucleotide
  modified_base 5: mod_base = OTHER; note = 2'-fluoro nucleotide
  modified_base 6: mod_base = OTHER; note = 2'-O-Methyl nucleotide
  modified_base 7: mod_base = OTHER; note = 2'-fluoro nucleotide
  modified_base 8: mod_base = OTHER; note = 2'-O-Methyl nucleotide
  modified_base 9: mod_base = OTHER; note = 2'-fluoro nucleotide
  modified_base 10: mod_base = OTHER; note = 2'-O-Methyl nucleotide
  modified_base 11: mod_base = OTHER; note = 2'-fluoro nucleotide
  modified_base 12: mod_base = OTHER; note = 2'-O-Methyl nucleotide
  modified_base 13: mod_base = OTHER; note = 2'-fluoro nucleotide
  modified_base 14: mod_base = OTHER; note = 2'-O-Methyl nucleotide
  modified_base 15: mod_base = OTHER; note = 2'-fluoro nucleotide
  modified_base 16: mod_base = OTHER; note = 2'-O-Methyl nucleotide
  modified_base 17: mod_base = OTHER; note = 2'-fluoro nucleotide
  modified_base 18: mod_base = OTHER; note = 2'-O-Methyl nucleotide
  modified_base 19: mod_base = OTHER; note = 2'-fluoro nucleotide
  modified_base 20: mod_base = OTHER; note = deoxy-thymine phosphorothioate
  misc_feature 1..19: note = RNA
  misc_feature 20..21: note = DNA
tccgagacgaagccacgtgtt

SEQ ID NO: 1665 - DNA, 21 bp, synthetic construct
  misc_feature 1..21: note = Description of Artificial Sequence: Synthetic oligonucleotide
  source 1..21: mol_type = other DNA
  modified_base 1: mod_base = OTHER; note = 2'-fluoro nucleotide
  modified_base 2: mod_base = OTHER; note = 2'-fluoro nucleotide
  modified_base 3: mod_base = OTHER; note = 2'-O-Methyl nucleotide
  modified_base 4: mod_base = OTHER; note = 2'-fluoro nucleotide
  modified_base 5: mod_base = OTHER; note = 2'-O-Methyl nucleotide
  modified_base 6: mod_base = OTHER; note = 2'-fluoro nucleotide
  modified_base 7: mod_base = OTHER; note = 2'-O-Methyl nucleotide
  modified_base 8: mod_base = OTHER; note = 2'-fluoro nucleotide
  modified_base 9: mod_base = OTHER; note = 2'-O-Methyl nucleotide
  modified_base 10: mod_base = OTHER; note = 2'-fluoro nucleotide
  modified_base 11: mod_base = OTHER; note = 2'-O-Methyl nucleotide
  modified_base 12: mod_base = OTHER; note = 2'-fluoro nucleotide
  modified_base 13: mod_base = OTHER; note = 2'-O-Methyl nucleotide
  modified_base 14: mod_base = OTHER; note = 2'-fluoro nucleotide
  modified_base 15: mod_base = OTHER; note = 2'-O-Methyl nucleotide
  modified_base 16: mod_base = OTHER; note = 2'-fluoro nucleotide
  modified_base 17: mod_base = OTHER; note = 2'-O-Methyl nucleotide
  modified_base 18: mod_base = OTHER; note = 2'-fluoro nucleotide
  modified_base 19: mod_base = OTHER; note = 2'-O-Methyl nucleotide
  modified_base 20: mod_base = OTHER; note = deoxy-thymine phosphorothioate
  misc_feature 1..19: note = RNA
  misc_feature 20..21: note = DNA
cacgtggcttcgtctcggatt

SEQ ID NO: 1666 - DNA, 21 bp, synthetic construct
  misc_feature 1..21: note = Description of Artificial Sequence: Synthetic oligonucleotide
  source 1..21: mol_type = other DNA
  modified_base 1: mod_base = OTHER; note = 2'-O-Methyl nucleotide
  modified_base 2: mod_base = OTHER; note = 2'-O-Methyl nucleotide
  modified_base 3: mod_base = OTHER; note = 2'-fluoro nucleotide
  modified_base 4: mod_base = OTHER; note = 2'-O-Methyl nucleotide
  modified_base 5: mod_base = OTHER; note = 2'-fluoro nucleotide
  modified_base 6: mod_base = OTHER; note = 2'-O-Methyl nucleotide
  modified_base 7: mod_base = OTHER; note = 2'-fluoro nucleotide
  modified_base 8: mod_base = OTHER; note = 2'-O-Methyl nucleotide
  modified_base 9: mod_base = OTHER; note = 2'-fluoro nucleotide
  modified_base 10: mod_base = OTHER; note = 2'-O-Methyl nucleotide
  modified_base 11: mod_base = OTHER; note = 2'-fluoro nucleotide
  modified_base 12: mod_base = OTHER; note = 2'-O-Methyl nucleotide
  modified_base 13: mod_base = OTHER; note = 2'-fluoro nucleotide
  modified_base 14: mod_base = OTHER; note = 2'-O-Methyl nucleotide
  modified_base 15: mod_base = OTHER; note = 2'-fluoro nucleotide
  modified_base 16: mod_base = OTHER; note = 2'-O-Methyl nucleotide
  modified_base 17: mod_base = OTHER; note = 2'-fluoro nucleotide
  modified_base 18: mod_base = OTHER; note = 2'-O-Methyl nucleotide
  modified_base 19: mod_base = OTHER; note = 2'-fluoro nucleotide
  modified_base 20: mod_base = OTHER; note = deoxy-thymine phosphorothioate
  misc_feature 1..19: note = RNA
  misc_feature 20..21: note = DNA
ccgagacgaagccacgtgctt

SEQ ID NO: 1667 - DNA, 21 bp, synthetic construct
  misc_feature 1..21: note = Description of Artificial Sequence: Synthetic oligonucleotide
  source 1..21: mol_type = other DNA
  modified_base 1: mod_base = OTHER; note = 2'-fluoro nucleotide
  modified_base 2: mod_base = OTHER; note = 2'-fluoro nucleotide
  modified_base 3: mod_base = OTHER; note = 2'-O-Methyl nucleotide
  modified_base 4: mod_base = OTHER; note = 2'-fluoro nucleotide
  modified_base 5: mod_base = OTHER; note = 2'-O-Methyl nucleotide
  modified_base 6: mod_base = OTHER; note = 2'-fluoro nucleotide
  modified_base 7: mod_base = OTHER; note = 2'-O-Methyl nucleotide
  modified_base 8: mod_base = OTHER; note = 2'-fluoro nucleotide
  modified_base 9: mod_base = OTHER; note = 2'-O-Methyl nucleotide
  modified_base 10: mod_base = OTHER; note = 2'-fluoro nucleotide
  modified_base 11: mod_base = OTHER; note = 2'-O-Methyl nucleotide
  modified_base 12: mod_base = OTHER; note = 2'-fluoro nucleotide
  modified_base 13: mod_base = OTHER; note = 2'-O-Methyl nucleotide
  modified_base 14: mod_base = OTHER; note = 2'-fluoro nucleotide
  modified_base 15: mod_base = OTHER; note = 2'-O-Methyl nucleotide
  modified_base 16: mod_base = OTHER; note = 2'-fluoro nucleotide
  modified_base 17: mod_base = OTHER; note = 2'-O-Methyl nucleotide
  modified_base 18: mod_base = OTHER; note = 2'-fluoro nucleotide
  modified_base 19: mod_base = OTHER; note = 2'-O-Methyl nucleotide
  modified_base 20: mod_base = OTHER; note = deoxy-thymine phosphorothioate
  misc_feature 1..19: note = RNA
  misc_feature 20..21: note = DNA
gcacgtggcttcgtctcggtt

SEQ ID NO: 1668 - DNA, 21 bp, synthetic construct
  misc_feature 1..21: note = Description of Artificial Sequence: Synthetic oligonucleotide
  source 1..21: mol_type = other DNA
  modified_base 1: mod_base = OTHER; note = 2'-O-Methyl nucleotide
  modified_base 2: mod_base = OTHER; note = 2'-O-Methyl nucleotide
  modified_base 3: mod_base = OTHER; note = 2'-fluoro nucleotide
  modified_base 4: mod_base = OTHER; note = 2'-O-Methyl nucleotide
  modified_base 5: mod_base = OTHER; note = 2'-fluoro nucleotide
  modified_base 6: mod_base = OTHER; note = 2'-O-Methyl nucleotide
  modified_base 7: mod_base = OTHER; note = 2'-fluoro nucleotide
  modified_base 8: mod_base = OTHER; note = 2'-O-Methyl nucleotide
  modified_base 9: mod_base = OTHER; note = 2'-fluoro nucleotide
  modified_base 10: mod_base = OTHER; note = 2'-O-Methyl nucleotide
  modified_base 11: mod_base = OTHER; note = 2'-fluoro nucleotide
  modified_base 12: mod_base = OTHER; note = 2'-O-Methyl nucleotide
  modified_base 13: mod_base = OTHER; note = 2'-fluoro nucleotide
  modified_base 14: mod_base = OTHER; note = 2'-O-Methyl nucleotide
  modified_base 15: mod_base = OTHER; note = 2'-fluoro nucleotide
  modified_base 16: mod_base = OTHER; note = 2'-O-Methyl nucleotide
  modified_base 17: mod_base = OTHER; note = 2'-fluoro nucleotide
  modified_base 18: mod_base = OTHER; note = 2'-O-Methyl nucleotide
  modified_base 19: mod_base = OTHER; note = 2'-fluoro nucleotide
  modified_base 20: mod_base = OTHER; note = deoxy-thymine phosphorothioate
  misc_feature 1..19: note = RNA
  misc_feature 20..21: note = DNA
gagacgaagccacgtgcaatt

SEQ ID NO: 1669 - DNA, 21 bp, synthetic construct
  misc_feature 1..21: note = Description of Artificial Sequence: Synthetic oligonucleotide
  source 1..21: mol_type = other DNA
  modified_base 1: mod_base = OTHER; note = 2'-fluoro nucleotide
  modified_base 2: mod_base = OTHER; note = 2'-fluoro nucleotide
  modified_base 3: mod_base = OTHER; note = 2'-O-Methyl nucleotide
  modified_base 4: mod_base = OTHER; note = 2'-fluoro nucleotide
  modified_base 5: mod_base = OTHER; note = 2'-O-Methyl nucleotide
  modified_base 6: mod_base = OTHER; note = 2'-fluoro nucleotide
  modified_base 7: mod_base = OTHER; note = 2'-O-Methyl nucleotide
  modified_base 8: mod_base = OTHER; note = 2'-fluoro nucleotide
  modified_base 9: mod_base = OTHER; note = 2'-O-Methyl nucleotide
  modified_base 10: mod_base = OTHER; note = 2'-fluoro nucleotide
  modified_base 11: mod_base = OTHER; note = 2'-O-Methyl nucleotide
  modified_base 12: mod_base = OTHER; note = 2'-fluoro nucleotide
  modified_base 13: mod_base = OTHER; note = 2'-O-Methyl nucleotide
  modified_base 14: mod_base = OTHER; note = 2'-fluoro nucleotide
  modified_base 15: mod_base = OTHER; note = 2'-O-Methyl nucleotide
  modified_base 16: mod_base = OTHER; note = 2'-fluoro nucleotide
  modified_base 17: mod_base = OTHER; note = 2'-O-Methyl nucleotide
  modified_base 18: mod_base = OTHER; note = 2'-fluoro nucleotide
  modified_base 19: mod_base = OTHER; note = 2'-O-Methyl nucleotide
  modified_base 20: mod_base = OTHER; note = deoxy-thymine phosphorothioate
  misc_feature 1..19: note = RNA
  misc_feature 20..21: note = DNA
ttgcacgtggcttcgtctctt

SEQ ID NO: 1670 - DNA, 21 bp, synthetic construct
  misc_feature 1..21: note = Description of Artificial Sequence: Synthetic oligonucleotide
  source 1..21: mol_type = other DNA
  modified_base 1: mod_base = OTHER; note = 2'-O-Methyl nucleotide
  modified_base 2: mod_base = OTHER; note = 2'-O-Methyl nucleotide
  modified_base 3: mod_base = OTHER; note = 2'-fluoro nucleotide
  modified_base 4: mod_base = OTHER; note = 2'-O-Methyl nucleotide
  modified_base 5: mod_base = OTHER; note = 2'-fluoro nucleotide
  modified_base 6: mod_base = OTHER; note = 2'-O-Methyl nucleotide
  modified_base 7: mod_base = OTHER; note = 2'-fluoro nucleotide
  modified_base 8: mod_base = OTHER; note = 2'-O-Methyl nucleotide
  modified_base 9: mod_base = OTHER; note = 2'-fluoro nucleotide
  modified_base 10: mod_base = OTHER; note = 2'-O-Methyl nucleotide
  modified_base 11: mod_base = OTHER; note = 2'-fluoro nucleotide
  modified_base 12: mod_base = OTHER; note = 2'-O-Methyl nucleotide
  modified_base 13: mod_base = OTHER; note = 2'-fluoro nucleotide
  modified_base 14: mod_base = OTHER; note = 2'-O-Methyl nucleotide
  modified_base 15: mod_base = OTHER; note = 2'-fluoro nucleotide
  modified_base 16: mod_base = OTHER; note = 2'-O-Methyl nucleotide
  modified_base 17: mod_base = OTHER; note = 2'-fluoro nucleotide
  modified_base 18: mod_base = OTHER; note = 2'-O-Methyl nucleotide
  modified_base 19: mod_base = OTHER; note = 2'-fluoro nucleotide
  modified_base 20: mod_base = OTHER; note = deoxy-thymine phosphorothioate
  misc_feature 1..19: note = RNA
  misc_feature 20..21: note = DNA
acgaagccacgtgcaaggatt

SEQ ID NO: 1671 - DNA, 21 bp, synthetic construct
  misc_feature 1..21: note = Description of Artificial Sequence: Synthetic oligonucleotide
  source 1..21: mol_type = other DNA
  modified_base 1: mod_base = OTHER; note = 2'-fluoro nucleotide
  modified_base 2: mod_base = OTHER; note = 2'-fluoro nucleotide
  modified_base 3: mod_base = OTHER; note = 2'-O-Methyl nucleotide
  modified_base 4: mod_base = OTHER; note = 2'-fluoro nucleotide
  modified_base 5: mod_base = OTHER; note = 2'-O-Methyl nucleotide
  modified_base 6: mod_base = OTHER; note = 2'-fluoro nucleotide
  modified_base 7: mod_base = OTHER; note = 2'-O-Methyl nucleotide
  modified_base 8: mod_base = OTHER; note = 2'-fluoro nucleotide
  modified_base 9: mod_base = OTHER; note = 2'-O-Methyl nucleotide
  modified_base 10: mod_base = OTHER; note = 2'-fluoro nucleotide
  modified_base 11: mod_base = OTHER; note = 2'-O-Methyl nucleotide
  modified_base 12: mod_base = OTHER; note = 2'-fluoro nucleotide
  modified_base 13: mod_base = OTHER; note = 2'-O-Methyl nucleotide
  modified_base 14: mod_base = OTHER; note = 2'-fluoro nucleotide
  modified_base 15: mod_base = OTHER; note = 2'-O-Methyl nucleotide
  modified_base 16: mod_base = OTHER; note = 2'-fluoro nucleotide
  modified_base 17: mod_base = OTHER; note = 2'-O-Methyl nucleotide
  modified_base 18: mod_base = OTHER; note = 2'-fluoro nucleotide
  modified_base 19: mod_base = OTHER; note = 2'-O-Methyl nucleotide
  modified_base 20: mod_base = OTHER; note = deoxy-thymine phosphorothioate
  misc_feature 1..19: note = RNA
  misc_feature 20..21: note = DNA
tccttgcacgtggcttcgttt

SEQ ID NO: 1672 - DNA, 21 bp, synthetic construct
  misc_feature 1..21: note = Description of Artificial Sequence: Synthetic oligonucleotide
  source 1..21: mol_type = other DNA
  modified_base 1: mod_base = OTHER; note = 2'-O-Methyl nucleotide
  modified_base 2: mod_base = OTHER; note = 2'-O-Methyl nucleotide
  modified_base 3: mod_base = OTHER; note = 2'-fluoro nucleotide
  modified_base 4: mod_base = OTHER; note = 2'-O-Methyl nucleotide
  modified_base 5: mod_base = OTHER; note = 2'-fluoro nucleotide
  modified_base 6: mod_base = OTHER; note = 2'-O-Methyl nucleotide
  modified_base 7: mod_base = OTHER; note = 2'-fluoro nucleotide
  modified_base 8: mod_base = OTHER; note = 2'-O-Methyl nucleotide
  modified_base 9: mod_base = OTHER; note = 2'-fluoro nucleotide
  modified_base 10: mod_base = OTHER; note = 2'-O-Methyl nucleotide
  modified_base 11: mod_base = OTHER; note = 2'-fluoro nucleotide
  modified_base 12: mod_base = OTHER; note = 2'-O-Methyl nucleotide
  modified_base 13: mod_base = OTHER; note = 2'-fluoro nucleotide
  modified_base 14: mod_base = OTHER; note = 2'-O-Methyl nucleotide
  modified_base 15: mod_base = OTHER; note = 2'-fluoro nucleotide
  modified_base 16: mod_base = OTHER; note = 2'-O-Methyl nucleotide
  modified_base 17: mod_base = OTHER; note = 2'-fluoro nucleotide
  modified_base 18: mod_base = OTHER; note = 2'-O-Methyl nucleotide
  modified_base 19: mod_base = OTHER; note = 2'-fluoro nucleotide
  modified_base 20: mod_base = OTHER; note = deoxy-thymine phosphorothioate
  misc_feature 1..19: note = RNA
  misc_feature 20..21: note = DNA
cgaagccacgtgcaaggactt

SEQ ID NO: 1673 - DNA, 21 bp, synthetic construct
  misc_feature 1..21: note = Description of Artificial Sequence: Synthetic oligonucleotide
  source 1..21: mol_type = other DNA
  modified_base 1: mod_base = OTHER; note = 2'-fluoro nucleotide
  modified_base 2: mod_base = OTHER; note = 2'-fluoro nucleotide
  modified_base 3: mod_base = OTHER; note = 2'-O-Methyl nucleotide
  modified_base 4: mod_base = OTHER; note = 2'-fluoro nucleotide
  modified_base 5: mod_base = OTHER; note = 2'-O-Methyl nucleotide
  modified_base 6: mod_base = OTHER; note = 2'-fluoro nucleotide
  modified_base 7: mod_base = OTHER; note = 2'-O-Methyl nucleotide
  modified_base 8: mod_base = OTHER; note = 2'-fluoro nucleotide
  modified_base 9: mod_base = OTHER; note = 2'-O-Methyl nucleotide
  modified_base 10: mod_base = OTHER; note = 2'-fluoro nucleotide
  modified_base 11: mod_base = OTHER; note = 2'-O-Methyl nucleotide
  modified_base 12: mod_base = OTHER; note = 2'-fluoro nucleotide
  modified_base 13: mod_base = OTHER; note = 2'-O-Methyl nucleotide
  modified_base 14: mod_base = OTHER; note = 2'-fluoro nucleotide
  modified_base 15: mod_base = OTHER; note = 2'-O-Methyl nucleotide
  modified_base 16: mod_base = OTHER; note = 2'-fluoro nucleotide
  modified_base 17: mod_base = OTHER; note = 2'-O-Methyl nucleotide
  modified_base 18: mod_base = OTHER; note = 2'-fluoro nucleotide
  modified_base 19: mod_base = OTHER; note = 2'-O-Methyl nucleotide
  modified_base 20: mod_base = OTHER; note = deoxy-thymine phosphorothioate
  misc_feature 1..19: note = RNA
  misc_feature 20..21: note = DNA
gtccttgcacgtggcttcgtt

SEQ ID NO: 1674 - DNA, 21 bp, synthetic construct
  misc_feature 1..21: note = Description of Artificial Sequence: Synthetic oligonucleotide
  source 1..21: mol_type = other DNA
  modified_base 1: mod_base = OTHER; note = 2'-O-Methyl nucleotide
  modified_base 2: mod_base = OTHER; note = 2'-O-Methyl nucleotide
  modified_base 3: mod_base = OTHER; note = 2'-fluoro nucleotide
  modified_base 4: mod_base = OTHER; note = 2'-O-Methyl nucleotide
  modified_base 5: mod_base = OTHER; note = 2'-fluoro nucleotide
  modified_base 6: mod_base = OTHER; note = 2'-O-Methyl nucleotide
  modified_base 7: mod_base = OTHER; note = 2'-fluoro nucleotide
  modified_base 8: mod_base = OTHER; note = 2'-O-Methyl nucleotide
  modified_base 9: mod_base = OTHER; note = 2'-fluoro nucleotide
  modified_base 10: mod_base = OTHER; note = 2'-O-Methyl nucleotide
  modified_base 11: mod_base = OTHER; note = 2'-fluoro nucleotide
  modified_base 12: mod_base = OTHER; note = 2'-O-Methyl nucleotide
  modified_base 13: mod_base = OTHER; note = 2'-fluoro nucleotide
  modified_base 14: mod_base = OTHER; note = 2'-O-Methyl nucleotide
  modified_base 15: mod_base = OTHER; note = 2'-fluoro nucleotide
  modified_base 16: mod_base = OTHER; note = 2'-O-Methyl nucleotide
  modified_base 17: mod_base = OTHER; note = 2'-fluoro nucleotide
  modified_base 18: mod_base = OTHER; note = 2'-O-Methyl nucleotide
  modified_base 19: mod_base = OTHER; note = 2'-fluoro nucleotide
  modified_base 20: mod_base = OTHER; note = deoxy-thymine phosphorothioate
  misc_feature 1..19: note = RNA
  misc_feature 20..21: note = DNA
gaagccacgtgcaaggacatt

SEQ ID NO: 1675 - DNA, 21 bp, synthetic construct
  misc_feature 1..21: note = Description of Artificial Sequence: Synthetic oligonucleotide
  source 1..21: mol_type = other DNA
  modified_base 1: mod_base = OTHER; note = 2'-fluoro nucleotide
  modified_base 2: mod_base = OTHER; note = 2'-fluoro nucleotide
  modified_base 3: mod_base = OTHER; note = 2'-O-Methyl nucleotide
  modified_base 4: mod_base = OTHER; note = 2'-fluoro nucleotide
  modified_base 5: mod_base = OTHER; note = 2'-O-Methyl nucleotide
  modified_base 6: mod_base = OTHER; note = 2'-fluoro nucleotide
  modified_base 7: mod_base = OTHER; note = 2'-O-Methyl nucleotide
  modified_base 8: mod_base = OTHER; note = 2'-fluoro nucleotide
  modified_base 9: mod_base = OTHER; note = 2'-O-Methyl nucleotide
  modified_base 10: mod_base = OTHER; note = 2'-fluoro nucleotide
  modified_base 11: mod_base = OTHER; note = 2'-O-Methyl nucleotide
  modified_base 12: mod_base = OTHER; note = 2'-fluoro nucleotide
  modified_base 13: mod_base = OTHER; note = 2'-O-Methyl nucleotide
  modified_base 14: mod_base = OTHER; note = 2'-fluoro nucleotide
  modified_base 15: mod_base = OTHER; note = 2'-O-Methyl nucleotide
  modified_base 16: mod_base = OTHER; note = 2'-fluoro nucleotide
  modified_base 17: mod_base = OTHER; note = 2'-O-Methyl nucleotide
  modified_base 18: mod_base = OTHER; note = 2'-fluoro nucleotide
  modified_base 19: mod_base = OTHER; note = 2'-O-Methyl nucleotide
  modified_base 20: mod_base = OTHER; note = deoxy-thymine phosphorothioate
  misc_feature 1..19: note = RNA
  misc_feature 20..21: note = DNA
tgtccttgcacgtggcttctt

SEQ ID NO: 1676 - DNA, 21 bp, synthetic construct
  misc_feature 1..21: note = Description of Artificial Sequence: Synthetic oligonucleotide
  source 1..21: mol_type = other DNA
  modified_base 1: mod_base = OTHER; note = 2'-O-Methyl nucleotide
  modified_base 2: mod_base = OTHER; note = 2'-O-Methyl nucleotide
  modified_base 3: mod_base = OTHER; note = 2'-fluoro nucleotide
  modified_base 4: mod_base = OTHER; note = 2'-O-Methyl nucleotide
  modified_base 5: mod_base = OTHER; note = 2'-fluoro nucleotide
  modified_base 6: mod_base = OTHER; note = 2'-O-Methyl nucleotide
  modified_base 7: mod_base = OTHER; note = 2'-fluoro nucleotide
  modified_base 8: mod_base = OTHER; note = 2'-O-Methyl nucleotide
  modified_base 9: mod_base = OTHER; note = 2'-fluoro nucleotide
  modified_base 10: mod_base = OTHER; note = 2'-O-Methyl nucleotide
  modified_base 11: mod_base = OTHER; note = 2'-fluoro nucleotide
  modified_base 12: mod_base = OTHER; note = 2'-O-Methyl nucleotide
  modified_base 13: mod_base = OTHER; note = 2'-fluoro nucleotide
  modified_base 14: mod_base = OTHER; note = 2'-O-Methyl nucleotide
  modified_base 15: mod_base = OTHER; note = 2'-fluoro nucleotide
  modified_base 16: mod_base = OTHER; note = 2'-O-Methyl nucleotide
  modified_base 17: mod_base = OTHER; note = 2'-fluoro nucleotide
  modified_base 18: mod_base = OTHER; note = 2'-O-Methyl nucleotide
  modified_base 19: mod_base = OTHER; note = 2'-fluoro nucleotide
  modified_base 20: mod_base = OTHER; note = deoxy-thymine phosphorothioate
  misc_feature 1..19: note = RNA
  misc_feature 20..21: note = DNA
aagccacgtgcaaggacactt

SEQ ID NO: 1677 - DNA, 21 bp, synthetic construct
  misc_feature 1..21: note = Description of Artificial Sequence: Synthetic oligonucleotide
  source 1..21: mol_type = other DNA
  modified_base 1: mod_base = OTHER; note = 2'-fluoro nucleotide
  modified_base 2: mod_base = OTHER; note = 2'-fluoro nucleotide
  modified_base 3: mod_base = OTHER; note = 2'-O-Methyl nucleotide
  modified_base 4: mod_base = OTHER; note = 2'-fluoro nucleotide
  modified_base 5: mod_base = OTHER; note = 2'-O-Methyl nucleotide
  modified_base 6: mod_base = OTHER; note = 2'-fluoro nucleotide
  modified_base 7: mod_base = OTHER; note = 2'-O-Methyl nucleotide
  modified_base 8: mod_base = OTHER; note = 2'-fluoro nucleotide
  modified_base 9: mod_base = OTHER; note = 2'-O-Methyl nucleotide
  modified_base 10: mod_base = OTHER; note = 2'-fluoro nucleotide
  modified_base 11: mod_base = OTHER; note = 2'-O-Methyl nucleotide
  modified_base 12: mod_base = OTHER; note = 2'-fluoro nucleotide
  modified_base 13: mod_base = OTHER; note = 2'-O-Methyl nucleotide
  modified_base 14: mod_base = OTHER; note = 2'-fluoro nucleotide
  modified_base 15: mod_base = OTHER; note = 2'-O-Methyl nucleotide
  modified_base 16: mod_base = OTHER; note = 2'-fluoro nucleotide
  modified_base 17: mod_base = OTHER; note = 2'-O-Methyl nucleotide
  modified_base 18: mod_base = OTHER; note = 2'-fluoro nucleotide
  modified_base 19: mod_base = OTHER; note = 2'-O-Methyl nucleotide
  modified_base 20: mod_base = OTHER; note = deoxy-thymine phosphorothioate
  misc_feature 1..19: note = RNA
  misc_feature 20..21: note = DNA
gtgtccttgcacgtggctttt

SEQ ID NO: 1678 - DNA, 21 bp, synthetic construct
  misc_feature 1..21: note = Description of Artificial Sequence: Synthetic oligonucleotide
  source 1..21: mol_type = other DNA
  modified_base 1: mod_base = OTHER; note = 2'-O-Methyl nucleotide
  modified_base 2: mod_base = OTHER; note = 2'-O-Methyl nucleotide
  modified_base 3: mod_base = OTHER; note = 2'-fluoro nucleotide
  modified_base 4: mod_base = OTHER; note = 2'-O-Methyl nucleotide
  modified_base 5: mod_base = OTHER; note = 2'-fluoro nucleotide
  modified_base 6: mod_base = OTHER; note = 2'-O-Methyl nucleotide
  modified_base 7: mod_base = OTHER; note = 2'-fluoro nucleotide
  modified_base 8: mod_base = OTHER; note = 2'-O-Methyl nucleotide
  modified_base 9: mod_base = OTHER; note = 2'-fluoro nucleotide
  modified_base 10: mod_base = OTHER; note = 2'-O-Methyl nucleotide
  modified_base 11: mod_base = OTHER; note = 2'-fluoro nucleotide
  modified_base 12: mod_base = OTHER; note = 2'-O-Methyl nucleotide
  modified_base 13: mod_base = OTHER; note = 2'-fluoro nucleotide
  modified_base 14: mod_base = OTHER; note = 2'-O-Methyl nucleotide
  modified_base 15: mod_base = OTHER; note = 2'-fluoro nucleotide
  modified_base 16: mod_base = OTHER; note = 2'-O-Methyl nucleotide
  modified_base 17: mod_base = OTHER; note = 2'-fluoro nucleotide
  modified_base 18: mod_base = OTHER; note = 2'-O-Methyl nucleotide
  modified_base 19: mod_base = OTHER; note = 2'-fluoro nucleotide
  modified_base 20: mod_base = OTHER; note = deoxy-thymine phosphorothioate
  misc_feature 1..19: note = RNA
  misc_feature 20..21: note = DNA
ccccactcatgctctacaatt

SEQ ID NO: 1679 - DNA, 21 bp, synthetic construct
  misc_feature 1..21: note = Description of Artificial Sequence: Synthetic oligonucleotide
  source 1..21: mol_type = other DNA
  modified_base 1: mod_base = OTHER; note = 2'-fluoro nucleotide
  modified_base 2: mod_base = OTHER; note = 2'-fluoro nucleotide
  modified_base 3: mod_base = OTHER; note = 2'-O-Methyl nucleotide
  modified_base 4: mod_base = OTHER; note = 2'-fluoro nucleotide
  modified_base 5: mod_base = OTHER; note = 2'-O-Methyl nucleotide
  modified_base 6: mod_base = OTHER; note = 2'-fluoro nucleotide
  modified_base 7: mod_base = OTHER; note = 2'-O-Methyl nucleotide
  modified_base 8: mod_base = OTHER; note = 2'-fluoro nucleotide
  modified_base 9: mod_base = OTHER; note = 2'-O-Methyl nucleotide
  modified_base 10: mod_base = OTHER; note = 2'-fluoro nucleotide
  modified_base 11: mod_base = OTHER; note = 2'-O-Methyl nucleotide
  modified_base 12: mod_base = OTHER; note = 2'-fluoro nucleotide
  modified_base 13: mod_base = OTHER; note = 2'-O-Methyl nucleotide
  modified_base 14: mod_base = OTHER; note = 2'-fluoro nucleotide
  modified_base 15: mod_base = OTHER; note = 2'-O-Methyl nucleotide
  modified_base 16: mod_base = OTHER; note = 2'-fluoro nucleotide
  modified_base 17: mod_base = OTHER; note = 2'-O-Methyl nucleotide
  modified_base 18: mod_base = OTHER; note = 2'-fluoro nucleotide
  modified_base 19: mod_base = OTHER; note = 2'-O-Methyl nucleotide
  modified_base 20: mod_base = OTHER; note = deoxy-thymine phosphorothioate
  misc_feature 1..19: note = RNA
  misc_feature 20..21: note = DNA
ttgtagagcatgagtggggtt

SEQ ID NO: 1680 - DNA, 21 bp, synthetic construct
  misc_feature 1..21: note = Description of Artificial Sequence: Synthetic oligonucleotide
  source 1..21: mol_type = other DNA
  modified_base 1: mod_base = OTHER; note = 2'-O-Methyl nucleotide
  modified_base 2: mod_base = OTHER; note = 2'-O-Methyl nucleotide
  modified_base 3: mod_base = OTHER; note = 2'-fluoro nucleotide
  modified_base 4: mod_base = OTHER; note = 2'-O-Methyl nucleotide
  modified_base 5: mod_base = OTHER; note = 2'-fluoro nucleotide
  modified_base 6: mod_base = OTHER; note = 2'-O-Methyl nucleotide
  modified_base 7: mod_base = OTHER; note = 2'-fluoro nucleotide
  modified_base 8: mod_base = OTHER; note = 2'-O-Methyl nucleotide
  modified_base 9: mod_base = OTHER; note = 2'-fluoro nucleotide
  modified_base 10: mod_base = OTHER; note = 2'-O-Methyl nucleotide
  modified_base 11: mod_base = OTHER; note = 2'-fluoro nucleotide
  modified_base 12: mod_base = OTHER; note = 2'-O-Methyl nucleotide
  modified_base 13: mod_base = OTHER; note = 2'-fluoro nucleotide
  modified_base 14: mod_base = OTHER; note = 2'-O-Methyl nucleotide
  modified_base 15: mod_base = OTHER; note = 2'-fluoro nucleotide
  modified_base 16: mod_base = OTHER; note = 2'-O-Methyl nucleotide
  modified_base 17: mod_base = OTHER; note = 2'-fluoro nucleotide
  modified_base 18: mod_base = OTHER; note = 2'-O-Methyl nucleotide
  modified_base 19: mod_base = OTHER; note = 2'-fluoro nucleotide
  modified_base 20: mod_base = OTHER; note = deoxy-thymine phosphorothioate
  misc_feature 1..19: note = RNA
  misc_feature 20..21: note = DNA
ccactcatgctctacaacctt

SEQ ID NO: 1681 - DNA, 21 bp, synthetic construct
  misc_feature 1..21: note = Description of Artificial Sequence: Synthetic oligonucleotide
  source 1..21: mol_type = other DNA
  modified_base 1: mod_base = OTHER; note = 2'-fluoro nucleotide
  modified_base 2: mod_base = OTHER; note = 2'-fluoro nucleotide
  modified_base 3: mod_base = OTHER; note = 2'-O-Methyl nucleotide
  modified_base 4: mod_base = OTHER; note = 2'-fluoro nucleotide
  modified_base 5: mod_base = OTHER; note = 2'-O-Methyl nucleotide
  modified_base 6: mod_base = OTHER; note = 2'-fluoro nucleotide
  modified_base 7: mod_base = OTHER; note = 2'-O-Methyl nucleotide
  modified_base 8: mod_base = OTHER; note = 2'-fluoro nucleotide
  modified_base 9: mod_base = OTHER; note = 2'-O-Methyl nucleotide
  modified_base 10: mod_base = OTHER; note = 2'-fluoro nucleotide
  modified_base 11: mod_base = OTHER; note = 2'-O-Methyl nucleotide
  modified_base 12: mod_base = OTHER; note = 2'-fluoro nucleotide
  modified_base 13: mod_base = OTHER; note = 2'-O-Methyl nucleotide
  modified_base 14: mod_base = OTHER; note = 2'-fluoro nucleotide
  modified_base 15: mod_base = OTHER; note = 2'-O-Methyl nucleotide
  modified_base 16: mod_base = OTHER; note = 2'-fluoro nucleotide
  modified_base 17: mod_base = OTHER; note = 2'-O-Methyl nucleotide
  modified_base 18: mod_base = OTHER; note = 2'-fluoro nucleotide
  modified_base 19: mod_base = OTHER; note = 2'-O-Methyl nucleotide
  modified_base 20: mod_base = OTHER; note = deoxy-thymine phosphorothioate
  misc_feature 1..19: note = RNA
  misc_feature 20..21: note = DNA
ggttgtagagcatgagtggtt

SEQ ID NO: 1682 - DNA, 21 bp, synthetic construct
  misc_feature 1..21: note = Description of Artificial Sequence: Synthetic oligonucleotide
  source 1..21: mol_type = other DNA
  modified_base 1: mod_base = OTHER; note = 2'-O-Methyl nucleotide
  modified_base 2: mod_base = OTHER; note = 2'-O-Methyl nucleotide
  modified_base 3: mod_base = OTHER; note = 2'-fluoro nucleotide
  modified_base 4: mod_base = OTHER; note = 2'-O-Methyl nucleotide
  modified_base 5: mod_base = OTHER; note = 2'-fluoro nucleotide
  modified_base 6: mod_base = OTHER; note = 2'-O-Methyl nucleotide
  modified_base 7: mod_base = OTHER; note = 2'-fluoro nucleotide
  modified_base 8: mod_base = OTHER; note = 2'-O-Methyl nucleotide
  modified_base 9: mod_base = OTHER; note = 2'-fluoro nucleotide
  modified_base 10: mod_base = OTHER; note = 2'-O-Methyl nucleotide
  modified_base 11: mod_base = OTHER; note = 2'-fluoro nucleotide
  modified_base 12: mod_base = OTHER; note = 2'-O-Methyl nucleotide
  modified_base 13: mod_base = OTHER; note = 2'-fluoro nucleotide
  modified_base 14: mod_base = OTHER; note = 2'-O-Methyl nucleotide
  modified_base 15: mod_base = OTHER; note = 2'-fluoro nucleotide
  modified_base 16: mod_base = OTHER; note = 2'-O-Methyl nucleotide
  modified_base 17: mod_base = OTHER; note = 2'-fluoro nucleotide
  modified_base 18: mod_base = OTHER; note = 2'-O-Methyl nucleotide
  modified_base 19: mod_base = OTHER; note = 2'-fluoro nucleotide
  modified_base 20: mod_base = OTHER; note = deoxy-thymine phosphorothioate
  misc_feature 1..19: note = RNA
  misc_feature 20..21: note = DNA
actcatgctctacaacccctt

SEQ ID NO: 1683 - DNA, 21 bp, synthetic construct
  misc_feature 1..21: note = Description of Artificial Sequence: Synthetic oligonucleotide
  source 1..21: mol_type = other DNA
  modified_base 1: mod_base = OTHER; note = 2'-fluoro nucleotide
  modified_base 2: mod_base = OTHER; note = 2'-fluoro nucleotide
  modified_base 3: mod_base = OTHER; note = 2'-O-Methyl nucleotide
  modified_base 4: mod_base = OTHER; note = 2'-fluoro nucleotide
  modified_base 5: mod_base = OTHER; note = 2'-O-Methyl nucleotide
  modified_base 6: mod_base = OTHER; note = 2'-fluoro nucleotide
  modified_base 7: mod_base = OTHER; note = 2'-O-Methyl nucleotide
  modified_base 8: mod_base = OTHER; note = 2'-fluoro nucleotide
  modified_base 9: mod_base = OTHER; note = 2'-O-Methyl nucleotide
  modified_base 10: mod_base = OTHER; note = 2'-fluoro nucleotide
  modified_base 11: mod_base = OTHER; note = 2'-O-Methyl nucleotide
  modified_base 12: mod_base = OTHER; note = 2'-fluoro nucleotide
  modified_base 13: mod_base = OTHER; note = 2'-O-Methyl nucleotide
  modified_base 14: mod_base = OTHER; note = 2'-fluoro nucleotide
  modified_base 15: mod_base = OTHER; note = 2'-O-Methyl nucleotide
  modified_base 16: mod_base = OTHER; note = 2'-fluoro nucleotide
  modified_base 17: mod_base = OTHER; note = 2'-O-Methyl nucleotide
  modified_base 18: mod_base = OTHER; note = 2'-fluoro nucleotide
  modified_base 19: mod_base = OTHER; note = 2'-O-Methyl nucleotide
  modified_base 20: mod_base = OTHER; note = deoxy-thymine phosphorothioate
  misc_feature 1..19: note = RNA
  misc_feature 20..21: note = DNA
ggggttgtagagcatgagttt

SEQ ID NO: 1684 - DNA, 21 bp, synthetic construct
  misc_feature 1..21: note = Description of Artificial Sequence: Synthetic oligonucleotide
  source 1..21: mol_type = other DNA
  modified_base 1: mod_base = OTHER; note = 2'-O-Methyl nucleotide
  modified_base 2: mod_base = OTHER; note = 2'-O-Methyl nucleotide
  modified_base 3: mod_base = OTHER; note = 2'-fluoro nucleotide
  modified_base 4: mod_base = OTHER; note = 2'-O-Methyl nucleotide
  modified_base 5: mod_base = OTHER; note = 2'-fluoro nucleotide
  modified_base 6: mod_base = OTHER; note = 2'-O-Methyl nucleotide
  modified_base 7: mod_base = OTHER; note = 2'-fluoro nucleotide
  modified_base 8: mod_base = OTHER; note = 2'-O-Methyl nucleotide
  modified_base 9: mod_base = OTHER; note = 2'-fluoro nucleotide
  modified_base 10: mod_base = OTHER; note = 2'-O-Methyl nucleotide
  modified_base 11: mod_base = OTHER; note = 2'-fluoro nucleotide
  modified_base 12: mod_base = OTHER; note = 2'-O-Methyl nucleotide
  modified_base 13: mod_base = OTHER; note = 2'-fluoro nucleotide
  modified_base 14: mod_base = OTHER; note = 2'-O-Methyl nucleotide
  modified_base 15: mod_base = OTHER; note = 2'-fluoro nucleotide
  modified_base 16: mod_base = OTHER; note = 2'-O-Methyl nucleotide
  modified_base 17: mod_base = OTHER; note = 2'-fluoro nucleotide
  modified_base 18: mod_base = OTHER; note = 2'-O-Methyl nucleotide
  modified_base 19: mod_base = OTHER; note = 2'-fluoro nucleotide
  modified_base 20: mod_base = OTHER; note = deoxy-thymine phosphorothioate
  misc_feature 1..19: note = RNA
  misc_feature 20..21: note = DNA
catgctctacaaccccacctt

SEQ ID NO: 1685 - DNA, 21 bp, synthetic construct
  misc_feature 1..21: note = Description of Artificial Sequence: Synthetic oligonucleotide
  source 1..21: mol_type = other DNA
  modified_base 1: mod_base = OTHER; note = 2'-fluoro nucleotide
  modified_base 2: mod_base = OTHER; note = 2'-fluoro nucleotide
  modified_base 3: mod_base = OTHER; note = 2'-O-Methyl nucleotide
  modified_base 4: mod_base = OTHER; note = 2'-fluoro nucleotide
  modified_base 5: mod_base = OTHER; note = 2'-O-Methyl nucleotide
  modified_base 6: mod_base = OTHER; note = 2'-fluoro nucleotide
  modified_base 7: mod_base = OTHER; note = 2'-O-Methyl nucleotide
  modified_base 8: mod_base = OTHER; note = 2'-fluoro nucleotide
  modified_base 9: mod_base = OTHER; note = 2'-O-Methyl nucleotide
  modified_base 10: mod_base = OTHER; note = 2'-fluoro nucleotide
  modified_base 11: mod_base = OTHER; note = 2'-O-Methyl nucleotide
  modified_base 12: mod_base = OTHER; note = 2'-fluoro nucleotide
  modified_base 13: mod_base = OTHER; note = 2'-O-Methyl nucleotide
  modified_base 14: mod_base = OTHER; note = 2'-fluoro nucleotide
  modified_base 15: mod_base = OTHER; note = 2'-O-Methyl nucleotide
  modified_base 16: mod_base = OTHER; note = 2'-fluoro nucleotide
  modified_base 17: mod_base = OTHER; note = 2'-O-Methyl nucleotide
  modified_base 18: mod_base = OTHER; note = 2'-fluoro nucleotide
  modified_base 19: mod_base = OTHER; note = 2'-O-Methyl nucleotide
  modified_base 20: mod_base = OTHER; note = deoxy-thymine phosphorothioate
  misc_feature 1..19: note = RNA
  misc_feature 20..21: note = DNA
ggtggggttgtagagcatgtt

SEQ ID NO: 1686 - DNA, 21 bp, synthetic construct
  misc_feature 1..21: note = Description of Artificial Sequence: Synthetic oligonucleotide
  source 1..21: mol_type = other DNA
  modified_base 1: mod_base = OTHER; note = 2'-O-Methyl nucleotide
  modified_base 2: mod_base = OTHER; note = 2'-O-Methyl nucleotide
  modified_base 3: mod_base = OTHER; note = 2'-fluoro nucleotide
  modified_base 4: mod_base = OTHER; note = 2'-O-Methyl nucleotide
  modified_base 5: mod_base = OTHER; note = 2'-fluoro nucleotide
  modified_base 6: mod_base = OTHER; note = 2'-O-Methyl nucleotide
  modified_base 7: mod_base = OTHER; note = 2'-fluoro nucleotide
  modified_base 8: mod_base = OTHER; note = 2'-O-Methyl nucleotide
  modified_base 9: mod_base = OTHER; note = 2'-fluoro nucleotide
  modified_base 10: mod_base = OTHER; note = 2'-O-Methyl nucleotide
  modified_base 11: mod_base = OTHER; note = 2'-fluoro nucleotide
  modified_base 12: mod_base = OTHER; note = 2'-O-Methyl nucleotide
  modified_base 13: mod_base = OTHER; note = 2'-fluoro nucleotide
  modified_base 14: mod_base = OTHER; note = 2'-O-Methyl nucleotide
  modified_base 15: mod_base = OTHER; note = 2'-fluoro nucleotide
  modified_base 16: mod_base = OTHER; note = 2'-O-Methyl nucleotide
  modified_base 17: mod_base = OTHER; note = 2'-fluoro nucleotide
  modified_base 18: mod_base = OTHER; note = 2'-O-Methyl nucleotide
  modified_base 19: mod_base = OTHER; note = 2'-fluoro nucleotide
  modified_base 20: mod_base = OTHER; note = deoxy-thymine phosphorothioate
  misc_feature 1..19: note = RNA
  misc_feature 20..21: note = DNA
ccagatggatgtgaacccctt

SEQ ID NO: 1687 - DNA, 21 bp, synthetic construct
  misc_feature 1..21: note = Description of Artificial Sequence: Synthetic oligonucleotide
  source 1..21: mol_type = other DNA
  modified_base 1: mod_base = OTHER; note = 2'-fluoro nucleotide
  modified_base 2: mod_base = OTHER; note = 2'-fluoro nucleotide
  modified_base 3: mod_base = OTHER; note = 2'-O-Methyl nucleotide
  modified_base 4: mod_base = OTHER; note = 2'-fluoro nucleotide
  modified_base 5: mod_base = OTHER; note = 2'-O-Methyl nucleotide
  modified_base 6: mod_base = OTHER; note = 2'-fluoro nucleotide
  modified_base 7: mod_base = OTHER; note = 2'-O-Methyl nucleotide
  modified_base 8: mod_base = OTHER; note = 2'-fluoro nucleotide
  modified_base 9: mod_base = OTHER; note = 2'-O-Methyl nucleotide
  modified_base 10: mod_base = OTHER; note = 2'-fluoro nucleotide
  modified_base 11: mod_base = OTHER; note = 2'-O-Methyl nucleotide
  modified_base 12: mod_base = OTHER; note = 2'-fluoro nucleotide
  modified_base 13: mod_base = OTHER; note = 2'-O-Methyl nucleotide
  modified_base 14: mod_base = OTHER; note = 2'-fluoro nucleotide
  modified_base 15: mod_base = OTHER; note = 2'-O-Methyl nucleotide
  modified_base 16: mod_base = OTHER; note = 2'-fluoro nucleotide
  modified_base 17: mod_base = OTHER; note = 2'-O-Methyl nucleotide
  modified_base 18: mod_base = OTHER; note = 2'-fluoro nucleotide
  modified_base 19: mod_base = OTHER; note = 2'-O-Methyl nucleotide
  modified_base 20: mod_base = OTHER; note = deoxy-thymine phosphorothioate
  misc_feature 1..19: note = RNA
  misc_feature 20..21: note = DNA
ggggttcacatccatctggtt

SEQ ID NO: 1688 - DNA, 21 bp, synthetic construct
  misc_feature 1..21: note = Description of Artificial Sequence: Synthetic oligonucleotide
  source 1..21: mol_type = other DNA
  modified_base 1: mod_base = OTHER; note = 2'-O-Methyl nucleotide
  modified_base 2: mod_base = OTHER; note = 2'-O-Methyl nucleotide
  modified_base 3: mod_base = OTHER; note = 2'-fluoro nucleotide
  modified_base 4: mod_base = OTHER; note = 2'-O-Methyl nucleotide
  modified_base 5: mod_base = OTHER; note = 2'-fluoro nucleotide
  modified_base 6: mod_base = OTHER; note = 2'-O-Methyl nucleotide
  modified_base 7: mod_base = OTHER; note = 2'-fluoro nucleotide
  modified_base 8: mod_base = OTHER; note = 2'-O-Methyl nucleotide
  modified_base 9: mod_base = OTHER; note = 2'-fluoro nucleotide
  modified_base 10: mod_base = OTHER; note = 2'-O-Methyl nucleotide
  modified_base 11: mod_base = OTHER; note = 2'-fluoro nucleotide
  modified_base 12: mod_base = OTHER; note = 2'-O-Methyl nucleotide
  modified_base 13: mod_base = OTHER; note = 2'-fluoro nucleotide
  modified_base 14: mod_base = OTHER; note = 2'-O-Methyl nucleotide
  modified_base 15: mod_base = OTHER; note = 2'-fluoro nucleotide
  modified_base 16: mod_base = OTHER; note = 2'-O-Methyl nucleotide
  modified_base 17: mod_base = OTHER; note = 2'-fluoro nucleotide
  modified_base 18: mod_base = OTHER; note = 2'-O-Methyl nucleotide
  modified_base 19: mod_base = OTHER; note = 2'-fluoro nucleotide
  modified_base 20: mod_base = OTHER; note = deoxy-thymine phosphorothioate
  misc_feature 1..19: note = RNA
  misc_feature 20..21: note = DNA
agatggatgtgaaccccgatt

SEQ ID NO: 1689 - DNA, 21 bp, synthetic construct
  misc_feature 1..21: note = Description of Artificial Sequence: Synthetic oligonucleotide
  source 1..21: mol_type = other DNA
  modified_base 1: mod_base = OTHER; note = 2'-fluoro nucleotide
  modified_base 2: mod_base = OTHER; note = 2'-fluoro nucleotide
  modified_base 3: mod_base = OTHER; note = 2'-O-Methyl nucleotide
  modified_base 4: mod_base = OTHER; note = 2'-fluoro nucleotide
  modified_base 5: mod_base = OTHER; note = 2'-O-Methyl nucleotide
  modified_base 6: mod_base = OTHER; note = 2'-fluoro nucleotide
  modified_base 7: mod_base = OTHER; note = 2'-O-Methyl nucleotide
  modified_base 8: mod_base = OTHER; note = 2'-fluoro nucleotide
  modified_base 9: mod_base = OTHER; note = 2'-O-Methyl nucleotide
  modified_base 10: mod_base = OTHER; note = 2'-fluoro nucleotide
  modified_base 11: mod_base = OTHER; note = 2'-O-Methyl nucleotide
  modified_base 12: mod_base = OTHER; note = 2'-fluoro nucleotide
  modified_base 13: mod_base = OTHER; note = 2'-O-Methyl nucleotide
  modified_base 14: mod_base = OTHER; note = 2'-fluoro nucleotide
  modified_base 15: mod_base = OTHER; note = 2'-O-Methyl nucleotide
  modified_base 16: mod_base = OTHER; note = 2'-fluoro nucleotide
  modified_base 17: mod_base = OTHER; note = 2'-O-Methyl nucleotide
  modified_base 18: mod_base = OTHER; note = 2'-fluoro nucleotide
  modified_base 19: mod_base = OTHER; note = 2'-O-Methyl nucleotide
  modified_base 20: mod_base = OTHER; note = deoxy-thymine phosphorothioate
  misc_feature 1..19: note = RNA
  misc_feature 20..21: note = DNA
tcggggttcacatccatcttt

SEQ ID NO: 1690 - DNA, 21 bp, synthetic construct
  misc_feature 1..21: note = Description of Artificial Sequence: Synthetic oligonucleotide
  source 1..21: mol_type = other DNA
  modified_base 1: mod_base = OTHER; note = 2'-O-Methyl nucleotide
  modified_base 2: mod_base = OTHER; note = 2'-O-Methyl nucleotide
  modified_base 3: mod_base = OTHER; note = 2'-fluoro nucleotide
  modified_base 4: mod_base = OTHER; note = 2'-O-Methyl nucleotide
  modified_base 5: mod_base = OTHER; note = 2'-fluoro nucleotide
  modified_base 6: mod_base = OTHER; note = 2'-O-Methyl nucleotide
  modified_base 7: mod_base = OTHER; note = 2'-fluoro nucleotide
  modified_base 8: mod_base = OTHER; note = 2'-O-Methyl nucleotide
  modified_base 9: mod_base = OTHER; note = 2'-fluoro nucleotide
  modified_base 10: mod_base = OTHER; note = 2'-O-Methyl nucleotide
  modified_base 11: mod_base = OTHER; note = 2'-fluoro nucleotide
  modified_base 12: mod_base = OTHER; note = 2'-O-Methyl nucleotide
  modified_base 13: mod_base = OTHER; note = 2'-fluoro nucleotide
  modified_base 14: mod_base = OTHER; note = 2'-O-Methyl nucleotide
  modified_base 15: mod_base = OTHER; note = 2'-fluoro nucleotide
  modified_base 16: mod_base = OTHER; note = 2'-O-Methyl nucleotide
  modified_base 17: mod_base = OTHER; note = 2'-fluoro nucleotide
  modified_base 18: mod_base = OTHER; note = 2'-O-Methyl nucleotide
  modified_base 19: mod_base = OTHER; note = 2'-fluoro nucleotide
  modified_base 20: mod_base = OTHER; note = deoxy-thymine phosphorothioate
  misc_feature 1..19: note = RNA
  misc_feature 20..21: note = DNA
gatggatgtgaaccccgagtt

SEQ ID NO: 1691 - DNA, 21 bp, synthetic construct
  misc_feature 1..21: note = Description of Artificial Sequence: Synthetic oligonucleotide
  source 1..21: mol_type = other DNA
  modified_base 1: mod_base = OTHER; note = 2'-fluoro nucleotide
  modified_base 2: mod_base = OTHER; note = 2'-fluoro nucleotide
  modified_base 3: mod_base = OTHER; note = 2'-O-Methyl nucleotide
  modified_base 4: mod_base = OTHER; note = 2'-fluoro nucleotide
  modified_base 5: mod_base = OTHER; note = 2'-O-Methyl nucleotide
  modified_base 6: mod_base = OTHER; note = 2'-fluoro nucleotide
  modified_base 7: mod_base = OTHER; note = 2'-O-Methyl nucleotide
  modified_base 8: mod_base = OTHER; note = 2'-fluoro nucleotide
  modified_base 9: mod_base = OTHER; note = 2'-O-Methyl nucleotide
  modified_base 10: mod_base = OTHER; note = 2'-fluoro nucleotide
  modified_base 11: mod_base = OTHER; note = 2'-O-Methyl nucleotide
  modified_base 12: mod_base = OTHER; note = 2'-fluoro nucleotide
  modified_base 13: mod_base = OTHER; note = 2'-O-Methyl nucleotide
  modified_base 14: mod_base = OTHER; note = 2'-fluoro nucleotide
  modified_base 15: mod_base = OTHER; note = 2'-O-Methyl nucleotide
  modified_base 16: mod_base = OTHER; note = 2'-fluoro nucleotide
  modified_base 17: mod_base = OTHER; note = 2'-O-Methyl nucleotide
  modified_base 18: mod_base = OTHER; note = 2'-fluoro nucleotide
  modified_base 19: mod_base = OTHER; note = 2'-O-Methyl nucleotide
  modified_base 20: mod_base = OTHER; note = deoxy-thymine phosphorothioate
  misc_feature 1..19: note = RNA
  misc_feature 20..21: note = DNA
ctcggggttcacatccatctt

SEQ ID NO: 1692 - DNA, 21 bp, synthetic construct
  misc_feature 1..21: note = Description of Artificial Sequence: Synthetic oligonucleotide
  source 1..21: mol_type = other DNA
  modified_base 1: mod_base = OTHER; note = 2'-O-Methyl nucleotide
  modified_base 2: mod_base = OTHER; note = 2'-O-Methyl nucleotide
  modified_base 3: mod_base = OTHER; note = 2'-fluoro nucleotide
  modified_base 4: mod_base = OTHER; note = 2'-O-Methyl nucleotide
  modified_base 5: mod_base = OTHER; note = 2'-fluoro nucleotide
  modified_base 6: mod_base = OTHER; note = 2'-O-Methyl nucleotide
  modified_base 7: mod_base = OTHER; note = 2'-fluoro nucleotide
  modified_base 8: mod_base = OTHER; note = 2'-O-Methyl nucleotide
  modified_base 9: mod_base = OTHER; note = 2'-fluoro nucleotide
  modified_base 10: mod_base = OTHER; note = 2'-O-Methyl nucleotide
  modified_base 11: mod_base = OTHER; note = 2'-fluoro nucleotide
  modified_base 12: mod_base = OTHER; note = 2'-O-Methyl nucleotide
  modified_base 13: mod_base = OTHER; note = 2'-fluoro nucleotide
  modified_base 14: mod_base = OTHER; note = 2'-O-Methyl nucleotide
  modified_base 15: mod_base = OTHER; note = 2'-fluoro nucleotide
  modified_base 16: mod_base = OTHER; note = 2'-O-Methyl nucleotide
  modified_base 17: mod_base = OTHER; note = 2'-fluoro nucleotide
  modified_base 18: mod_base = OTHER; note = 2'-O-Methyl nucleotide
  modified_base 19: mod_base = OTHER; note = 2'-fluoro nucleotide
  modified_base 20: mod_base = OTHER; note = deoxy-thymine phosphorothioate
  misc_feature 1..19: note = RNA
  misc_feature 20..21: note = DNA
atggatgtgaaccccgaggtt

SEQ ID NO: 1693 - DNA, 21 bp, synthetic construct
  misc_feature 1..21: note = Description of Artificial Sequence: Synthetic oligonucleotide
  source 1..21: mol_type = other DNA
  modified_base 1: mod_base = OTHER; note = 2'-fluoro nucleotide
  modified_base 2: mod_base = OTHER; note = 2'-fluoro nucleotide
  modified_base 3: mod_base = OTHER; note = 2'-O-Methyl nucleotide
  modified_base 4: mod_base = OTHER; note = 2'-fluoro nucleotide
  modified_base 5: mod_base = OTHER; note = 2'-O-Methyl nucleotide
  modified_base 6: mod_base = OTHER; note = 2'-fluoro nucleotide
  modified_base 7: mod_base = OTHER; note = 2'-O-Methyl nucleotide
  modified_base 8: mod_base = OTHER; note = 2'-fluoro nucleotide
  modified_base 9: mod_base = OTHER; note = 2'-O-Methyl nucleotide
  modified_base 10: mod_base = OTHER; note = 2'-fluoro nucleotide
  modified_base 11: mod_base = OTHER; note = 2'-O-Methyl nucleotide
  modified_base 12: mod_base = OTHER; note = 2'-fluoro nucleotide
  modified_base 13: mod_base = OTHER; note = 2'-O-Methyl nucleotide
  modified_base 14: mod_base = OTHER; note = 2'-fluoro nucleotide
  modified_base 15: mod_base = OTHER; note = 2'-O-Methyl nucleotide
  modified_base 16: mod_base = OTHER; note = 2'-fluoro nucleotide
  modified_base 17: mod_base = OTHER; note = 2'-O-Methyl nucleotide
  modified_base 18: mod_base = OTHER; note = 2'-fluoro nucleotide
  modified_base 19: mod_base = OTHER; note = 2'-O-Methyl nucleotide
  modified_base 20: mod_base = OTHER; note = deoxy-thymine phosphorothioate
  misc_feature 1..19: note = RNA
  misc_feature 20..21: note = DNA
cctcggggttcacatccattt

SEQ ID NO: 1694 - DNA, 21 bp, synthetic construct
  misc_feature 1..21: note = Description of Artificial Sequence: Synthetic oligonucleotide
  source 1..21: mol_type = other DNA
  modified_base 1: mod_base = OTHER; note = 2'-O-Methyl nucleotide
  modified_base 2: mod_base = OTHER; note = 2'-O-Methyl nucleotide
  modified_base 3: mod_base = OTHER; note = 2'-fluoro nucleotide
  modified_base 4: mod_base = OTHER; note = 2'-O-Methyl nucleotide
  modified_base 5: mod_base = OTHER; note = 2'-fluoro nucleotide
  modified_base 6: mod_base = OTHER; note = 2'-O-Methyl nucleotide
  modified_base 7: mod_base = OTHER; note = 2'-fluoro nucleotide
  modified_base 8: mod_base = OTHER; note = 2'-O-Methyl nucleotide
  modified_base 9: mod_base = OTHER; note = 2'-fluoro nucleotide
  modified_base 10: mod_base = OTHER; note = 2'-O-Methyl nucleotide
  modified_base 11: mod_base = OTHER; note = 2'-fluoro nucleotide
  modified_base 12: mod_base = OTHER; note = 2'-O-Methyl nucleotide
  modified_base 13: mod_base = OTHER; note = 2'-fluoro nucleotide
  modified_base 14: mod_base = OTHER; note = 2'-O-Methyl nucleotide
  modified_base 15: mod_base = OTHER; note = 2'-fluoro nucleotide
  modified_base 16: mod_base = OTHER; note = 2'-O-Methyl nucleotide
  modified_base 17: mod_base = OTHER; note = 2'-fluoro nucleotide
  modified_base 18: mod_base = OTHER; note = 2'-O-Methyl nucleotide
  modified_base 19: mod_base = OTHER; note = 2'-fluoro nucleotide
  modified_base 20: mod_base = OTHER; note = deoxy-thymine phosphorothioate
  misc_feature 1..19: note = RNA
  misc_feature 20..21: note = DNA
ggatgtgaaccccgagggctt

SEQ ID NO: 1695 - DNA, 21 bp, synthetic construct
  misc_feature 1..21: note = Description of Artificial Sequence: Synthetic oligonucleotide
  source 1..21: mol_type = other DNA
  modified_base 1: mod_base = OTHER; note = 2'-fluoro nucleotide
  modified_base 2: mod_base = OTHER; note = 2'-fluoro nucleotide
  modified_base 3: mod_base = OTHER; note = 2'-O-Methyl nucleotide
  modified_base 4: mod_base = OTHER; note = 2'-fluoro nucleotide
  modified_base 5: mod_base = OTHER; note = 2'-O-Methyl nucleotide
  modified_base 6: mod_base = OTHER; note = 2'-fluoro nucleotide
  modified_base 7: mod_base = OTHER; note = 2'-O-Methyl nucleotide
  modified_base 8: mod_base = OTHER; note = 2'-fluoro nucleotide
  modified_base 9: mod_base = OTHER; note = 2'-O-Methyl nucleotide
  modified_base 10: mod_base = OTHER; note = 2'-fluoro nucleotide
  modified_base 11: mod_base = OTHER; note = 2'-O-Methyl nucleotide
  modified_base 12: mod_base = OTHER; note = 2'-fluoro nucleotide
  modified_base 13: mod_base = OTHER; note = 2'-O-Methyl nucleotide
  modified_base 14: mod_base = OTHER; note = 2'-fluoro nucleotide
  modified_base 15: mod_base = OTHER; note = 2'-O-Methyl nucleotide
  modified_base 16: mod_base = OTHER; note = 2'-fluoro nucleotide
  modified_base 17: mod_base = OTHER; note = 2'-O-Methyl nucleotide
  modified_base 18: mod_base = OTHER; note = 2'-fluoro nucleotide
  modified_base 19: mod_base = OTHER; note = 2'-O-Methyl nucleotide
  modified_base 20: mod_base = OTHER; note = deoxy-thymine phosphorothioate
  misc_feature 1..19: note = RNA
  misc_feature 20..21: note = DNA
gccctcggggttcacatcctt

SEQ ID NO: 1696 - DNA, 21 bp, synthetic construct
  misc_feature 1..21: note = Description of Artificial Sequence: Synthetic oligonucleotide
  source 1..21: mol_type = other DNA
  modified_base 1: mod_base = OTHER; note = 2'-O-Methyl nucleotide
  modified_base 2: mod_base = OTHER; note = 2'-O-Methyl nucleotide
  modified_base 3: mod_base = OTHER; note = 2'-fluoro nucleotide
  modified_base 4: mod_base = OTHER; note = 2'-O-Methyl nucleotide
  modified_base 5: mod_base = OTHER; note = 2'-fluoro nucleotide
  modified_base 6: mod_base = OTHER; note = 2'-O-Methyl nucleotide
  modified_base 7: mod_base = OTHER; note = 2'-fluoro nucleotide
  modified_base 8: mod_base = OTHER; note = 2'-O-Methyl nucleotide
  modified_base 9: mod_base = OTHER; note = 2'-fluoro nucleotide
  modified_base 10: mod_base = OTHER; note = 2'-O-Methyl nucleotide
  modified_base 11: mod_base = OTHER; note = 2'-fluoro nucleotide
  modified_base 12: mod_base = OTHER; note = 2'-O-Methyl nucleotide
  modified_base 13: mod_base = OTHER; note = 2'-fluoro nucleotide
  modified_base 14: mod_base = OTHER; note = 2'-O-Methyl nucleotide
  modified_base 15: mod_base = OTHER; note = 2'-fluoro nucleotide
  modified_base 16: mod_base = OTHER; note = 2'-O-Methyl nucleotide
  modified_base 17: mod_base = OTHER; note = 2'-fluoro nucleotide
  modified_base 18: mod_base = OTHER; note = 2'-O-Methyl nucleotide
  modified_base 19: mod_base = OTHER; note = 2'-fluoro nucleotide
  modified_base 20: mod_base = OTHER; note = deoxy-thymine phosphorothioate
  misc_feature 1..19: note = RNA
  misc_feature 20..21: note = DNA
gatgtgaaccccgagggcatt

SEQ ID NO: 1697 - DNA, 21 bp, synthetic construct
  misc_feature 1..21: note = Description of Artificial Sequence: Synthetic oligonucleotide
  source 1..21: mol_type = other DNA
  modified_base 1: mod_base = OTHER; note = 2'-fluoro nucleotide
  modified_base 2: mod_base = OTHER; note = 2'-fluoro nucleotide
  modified_base 3: mod_base = OTHER; note = 2'-O-Methyl nucleotide
  modified_base 4: mod_base = OTHER; note = 2'-fluoro nucleotide
  modified_base 5: mod_base = OTHER; note = 2'-O-Methyl nucleotide
  modified_base 6: mod_base = OTHER; note = 2'-fluoro nucleotide
  modified_base 7: mod_base = OTHER; note = 2'-O-Methyl nucleotide
  modified_base 8: mod_base = OTHER; note = 2'-fluoro nucleotide
  modified_base 9: mod_base = OTHER; note = 2'-O-Methyl nucleotide
  modified_base 10: mod_base = OTHER; note = 2'-fluoro nucleotide
  modified_base 11: mod_base = OTHER; note = 2'-O-Methyl nucleotide
  modified_base 12: mod_base = OTHER; note = 2'-fluoro nucleotide
  modified_base 13: mod_base = OTHER; note = 2'-O-Methyl nucleotide
  modified_base 14: mod_base = OTHER; note = 2'-fluoro nucleotide
  modified_base 15: mod_base = OTHER; note = 2'-O-Methyl nucleotide
  modified_base 16: mod_base = OTHER; note = 2'-fluoro nucleotide
  modified_base 17: mod_base = OTHER; note = 2'-O-Methyl nucleotide
  modified_base 18: mod_base = OTHER; note = 2'-fluoro nucleotide
  modified_base 19: mod_base = OTHER; note = 2'-O-Methyl nucleotide
  modified_base 20: mod_base = OTHER; note = deoxy-thymine phosphorothioate
  misc_feature 1..19: note = RNA
  misc_feature 20..21: note = DNA
tgccctcggggttcacatctt

SEQ ID NO: 1698 - DNA, 21 bp, synthetic construct
  misc_feature 1..21: note = Description of Artificial Sequence: Synthetic oligonucleotide
  source 1..21: mol_type = other DNA
  modified_base 1: mod_base = OTHER; note = 2'-O-Methyl nucleotide
  modified_base 2: mod_base = OTHER; note = 2'-O-Methyl nucleotide
  modified_base 3: mod_base = OTHER; note = 2'-fluoro nucleotide
  modified_base 4: mod_base = OTHER; note = 2'-O-Methyl nucleotide
  modified_base 5: mod_base = OTHER; note = 2'-fluoro nucleotide
  modified_base 6: mod_base = OTHER; note = 2'-O-Methyl nucleotide
  modified_base 7: mod_base = OTHER; note = 2'-fluoro nucleotide
  modified_base 8: mod_base = OTHER; note = 2'-O-Methyl nucleotide
  modified_base 9: mod_base = OTHER; note = 2'-fluoro nucleotide
  modified_base 10: mod_base = OTHER; note = 2'-O-Methyl nucleotide
  modified_base 11: mod_base = OTHER; note = 2'-fluoro nucleotide
  modified_base 12: mod_base = OTHER; note = 2'-O-Methyl nucleotide
  modified_base 13: mod_base = OTHER; note = 2'-fluoro nucleotide
  modified_base 14: mod_base = OTHER; note = 2'-O-Methyl nucleotide
  modified_base 15: mod_base = OTHER; note = 2'-fluoro nucleotide
  modified_base 16: mod_base = OTHER; note = 2'-O-Methyl nucleotide
  modified_base 17: mod_base = OTHER; note = 2'-fluoro nucleotide
  modified_base 18: mod_base = OTHER; note = 2'-O-Methyl nucleotide
  modified_base 19: mod_base = OTHER; note = 2'-fluoro nucleotide
  modified_base 20: mod_base = OTHER; note = deoxy-thymine phosphorothioate
  misc_feature 1..19: note = RNA
  misc_feature 20..21: note = DNA
tgtgaaccccgagggcaaatt

SEQ ID NO: 1699 - DNA, 21 bp, synthetic construct
  misc_feature 1..21: note = Description of Artificial Sequence: Synthetic oligonucleotide
  source 1..21: mol_type = other DNA
  modified_base 1: mod_base = OTHER; note = 2'-fluoro nucleotide
  modified_base 2: mod_base = OTHER; note = 2'-fluoro nucleotide
  modified_base 3: mod_base = OTHER; note = 2'-O-Methyl nucleotide
  modified_base 4: mod_base = OTHER; note = 2'-fluoro nucleotide
  modified_base 5: mod_base = OTHER; note = 2'-O-Methyl nucleotide
  modified_base 6: mod_base = OTHER; note = 2'-fluoro nucleotide
  modified_base 7: mod_base = OTHER; note = 2'-O-Methyl nucleotide
  modified_base 8: mod_base = OTHER; note = 2'-fluoro nucleotide
  modified_base 9: mod_base = OTHER; note = 2'-O-Methyl nucleotide
  modified_base 10: mod_base = OTHER; note = 2'-fluoro nucleotide
  modified_base 11: mod_base = OTHER; note = 2'-O-Methyl nucleotide
  modified_base 12: mod_base = OTHER; note = 2'-fluoro nucleotide
  modified_base 13: mod_base = OTHER; note = 2'-O-Methyl nucleotide
  modified_base 14: mod_base = OTHER; note = 2'-fluoro nucleotide
  modified_base 15: mod_base = OTHER; note = 2'-O-Methyl nucleotide
  modified_base 16: mod_base = OTHER; note = 2'-fluoro nucleotide
  modified_base 17: mod_base = OTHER; note = 2'-O-Methyl nucleotide
  modified_base 18: mod_base = OTHER; note = 2'-fluoro nucleotide
  modified_base 19: mod_base = OTHER; note = 2'-O-Methyl nucleotide
  modified_base 20: mod_base = OTHER; note = deoxy-thymine phosphorothioate
  misc_feature 1..19: note = RNA
  misc_feature 20..21: note = DNA
tttgccctcggggttcacatt

SEQ ID NO: 1700 - DNA, 21 bp, synthetic construct
  misc_feature 1..21: note = Description of Artificial Sequence: Synthetic oligonucleotide
  source 1..21: mol_type = other DNA
  modified_base 1: mod_base = OTHER; note = 2'-O-Methyl nucleotide
  modified_base 2: mod_base = OTHER; note = 2'-O-Methyl nucleotide
  modified_base 3: mod_base = OTHER; note = 2'-fluoro nucleotide
  modified_base 4: mod_base = OTHER; note = 2'-O-Methyl nucleotide
  modified_base 5: mod_base = OTHER; note = 2'-fluoro nucleotide
  modified_base 6: mod_base = OTHER; note = 2'-O-Methyl nucleotide
  modified_base 7: mod_base = OTHER; note = 2'-fluoro nucleotide
  modified_base 8: mod_base = OTHER; note = 2'-O-Methyl nucleotide
  modified_base 9: mod_base = OTHER; note = 2'-fluoro nucleotide
  modified_base 10: mod_base = OTHER; note = 2'-O-Methyl nucleotide
  modified_base 11: mod_base = OTHER; note = 2'-fluoro nucleotide
  modified_base 12: mod_base = OTHER; note = 2'-O-Methyl nucleotide
  modified_base 13: mod_base = OTHER; note = 2'-fluoro nucleotide
  modified_base 14: mod_base = OTHER; note = 2'-O-Methyl nucleotide
  modified_base 15: mod_base = OTHER; note = 2'-fluoro nucleotide
  modified_base 16: mod_base = OTHER; note = 2'-O-Methyl nucleotide
  modified_base 17: mod_base = OTHER; note = 2'-fluoro nucleotide
  modified_base 18: mod_base = OTHER; note = 2'-O-Methyl nucleotide
  modified_base 19: mod_base = OTHER; note = 2'-fluoro nucleotide
  modified_base 20: mod_base = OTHER; note = deoxy-thymine phosphorothioate
  misc_feature 1..19: note = RNA
  misc_feature 20..21: note = DNA
aaccccgagggcaaatacatt

SEQ ID NO: 1701 - DNA, 21 bp, synthetic construct
  misc_feature 1..21: note = Description of Artificial Sequence: Synthetic oligonucleotide
  source 1..21: mol_type = other DNA
  modified_base 1: mod_base = OTHER; note = 2'-fluoro nucleotide
  modified_base 2: mod_base = OTHER; note = 2'-fluoro nucleotide
  modified_base 3: mod_base = OTHER; note = 2'-O-Methyl nucleotide
  modified_base 4: mod_base = OTHER; note = 2'-fluoro nucleotide
  modified_base 5: mod_base = OTHER; note = 2'-O-Methyl nucleotide
  modified_base 6: mod_base = OTHER; note = 2'-fluoro nucleotide
  modified_base 7: mod_base = OTHER; note = 2'-O-Methyl nucleotide
  modified_base 8: mod_base = OTHER; note = 2'-fluoro nucleotide
  modified_base 9: mod_base = OTHER; note = 2'-O-Methyl nucleotide
  modified_base 10: mod_base = OTHER; note = 2'-fluoro nucleotide
  modified_base 11: mod_base = OTHER; note = 2'-O-Methyl nucleotide
  modified_base 12: mod_base = OTHER; note = 2'-fluoro nucleotide
  modified_base 13: mod_base = OTHER; note = 2'-O-Methyl nucleotide
  modified_base 14: mod_base = OTHER; note = 2'-fluoro nucleotide
  modified_base 15: mod_base = OTHER; note = 2'-O-Methyl nucleotide
  modified_base 16: mod_base = OTHER; note = 2'-fluoro nucleotide
  modified_base 17: mod_base = OTHER; note = 2'-O-Methyl nucleotide
  modified_base 18: mod_base = OTHER; note = 2'-fluoro nucleotide
  modified_base 19: mod_base = OTHER; note = 2'-O-Methyl nucleotide
  modified_base 20: mod_base = OTHER; note = deoxy-thymine phosphorothioate
  misc_feature 1..19: note = RNA
  misc_feature 20..21: note = DNA
tgtatttgccctcggggtttt

SEQ ID NO: 1702 - DNA, 21 bp, synthetic construct
  misc_feature 1..21: note = Description of Artificial Sequence: Synthetic oligonucleotide
  source 1..21: mol_type = other DNA
  modified_base 1: mod_base = OTHER; note = 2'-O-Methyl nucleotide
  modified_base 2: mod_base = OTHER; note = 2'-O-Methyl nucleotide
  modified_base 3: mod_base = OTHER; note = 2'-fluoro nucleotide
  modified_base 4: mod_base = OTHER; note = 2'-O-Methyl nucleotide
  modified_base 5: mod_base = OTHER; note = 2'-fluoro nucleotide
  modified_base 6: mod_base = OTHER; note = 2'-O-Methyl nucleotide
  modified_base 7: mod_base = OTHER; note = 2'-fluoro nucleotide
  modified_base 8: mod_base = OTHER; note = 2'-O-Methyl nucleotide
  modified_base 9: mod_base = OTHER; note = 2'-fluoro nucleotide
  modified_base 10: mod_base = OTHER; note = 2'-O-Methyl nucleotide
  modified_base 11: mod_base = OTHER; note = 2'-fluoro nucleotide
  modified_base 12: mod_base = OTHER; note = 2'-O-Methyl nucleotide
  modified_base 13: mod_base = OTHER; note = 2'-fluoro nucleotide
  modified_base 14: mod_base = OTHER; note = 2'-O-Methyl nucleotide
  modified_base 15: mod_base = OTHER; note = 2'-fluoro nucleotide
  modified_base 16: mod_base = OTHER; note = 2'-O-Methyl nucleotide
  modified_base 17: mod_base = OTHER; note = 2'-fluoro nucleotide
  modified_base 18: mod_base = OTHER; note = 2'-O-Methyl nucleotide
  modified_base 19: mod_base = OTHER; note = 2'-fluoro nucleotide
  modified_base 20: mod_base = OTHER; note = deoxy-thymine phosphorothioate
  misc_feature 1..19: note = RNA
  misc_feature 20..21: note = DNA
accccgagggcaaatacagtt

SEQ ID NO: 1703 - DNA, 21 bp, synthetic construct
  misc_feature 1..21: note = Description of Artificial Sequence: Synthetic oligonucleotide
  source 1..21: mol_type = other DNA
  modified_base 1: mod_base = OTHER; note = 2'-fluoro nucleotide
  modified_base 2: mod_base = OTHER; note = 2'-fluoro nucleotide
  modified_base 3: mod_base = OTHER; note = 2'-O-Methyl nucleotide
  modified_base 4: mod_base = OTHER; note = 2'-fluoro nucleotide
  modified_base 5: mod_base = OTHER; note = 2'-O-Methyl nucleotide
  modified_base 6: mod_base = OTHER; note = 2'-fluoro nucleotide
  modified_base 7: mod_base = OTHER; note = 2'-O-Methyl nucleotide
  modified_base 8: mod_base = OTHER; note = 2'-fluoro nucleotide
  modified_base 9: mod_base = OTHER; note = 2'-O-Methyl nucleotide
  modified_base 10: mod_base = OTHER; note = 2'-fluoro nucleotide
  modified_base 11: mod_base = OTHER; note = 2'-O-Methyl nucleotide
  modified_base 12: mod_base = OTHER; note = 2'-fluoro nucleotide
  modified_base 13: mod_base = OTHER; note = 2'-O-Methyl nucleotide
  modified_base 14: mod_base = OTHER; note = 2'-fluoro nucleotide
  modified_base 15: mod_base = OTHER; note = 2'-O-Methyl nucleotide
  modified_base 16: mod_base = OTHER; note = 2'-fluoro nucleotide
  modified_base 17: mod_base = OTHER; note = 2'-O-Methyl nucleotide
  modified_base 18: mod_base = OTHER; note = 2'-fluoro nucleotide
  modified_base 19: mod_base = OTHER; note = 2'-O-Methyl nucleotide
  modified_base 20: mod_base = OTHER; note = deoxy-thymine phosphorothioate
  misc_feature 1..19: note = RNA
  misc_feature 20..21: note = DNA
ctgtatttgccctcggggttt

SEQ ID NO: 1704 - DNA, 21 bp, synthetic construct
  misc_feature 1..21: note = Description of Artificial Sequence: Synthetic oligonucleotide
  source 1..21: mol_type = other DNA
  modified_base 1: mod_base = OTHER; note = 2'-O-Methyl nucleotide
  modified_base 2: mod_base = OTHER; note = 2'-O-Methyl nucleotide
  modified_base 3: mod_base = OTHER; note = 2'-fluoro nucleotide
  modified_base 4: mod_base = OTHER; note = 2'-O-Methyl nucleotide
  modified_base 5: mod_base = OTHER; note = 2'-fluoro nucleotide
  modified_base 6: mod_base = OTHER; note = 2'-O-Methyl nucleotide
  modified_base 7: mod_base = OTHER; note = 2'-fluoro nucleotide
  modified_base 8: mod_base = OTHER; note = 2'-O-Methyl nucleotide
  modified_base 9: mod_base = OTHER; note = 2'-fluoro nucleotide
  modified_base 10: mod_base = OTHER; note = 2'-O-Methyl nucleotide
  modified_base 11: mod_base = OTHER; note = 2'-fluoro nucleotide
  modified_base 12: mod_base = OTHER; note = 2'-O-Methyl nucleotide
  modified_base 13: mod_base = OTHER; note = 2'-fluoro nucleotide
  modified_base 14: mod_base = OTHER; note = 2'-O-Methyl nucleotide
  modified_base 15: mod_base = OTHER; note = 2'-fluoro nucleotide
  modified_base 16: mod_base = OTHER; note = 2'-O-Methyl nucleotide
  modified_base 17: mod_base = OTHER; note = 2'-fluoro nucleotide
  modified_base 18: mod_base = OTHER; note = 2'-O-Methyl nucleotide
  modified_base 19: mod_base = OTHER; note = 2'-fluoro nucleotide
  modified_base 20: mod_base = OTHER; note = deoxy-thymine phosphorothioate
  misc_feature 1..19: note = RNA
  misc_feature 20..21: note = DNA
cccgagggcaaatacagcttt

SEQ ID NO: 1705 - DNA, 21 bp, synthetic construct
  misc_feature 1..21: note = Description of Artificial Sequence: Synthetic oligonucleotide
  source 1..21: mol_type = other DNA
  modified_base 1: mod_base = OTHER; note = 2'-fluoro nucleotide
  modified_base 2: mod_base = OTHER; note = 2'-fluoro nucleotide
  modified_base 3: mod_base = OTHER; note = 2'-O-Methyl nucleotide
  modified_base 4: mod_base = OTHER; note = 2'-fluoro nucleotide
  modified_base 5: mod_base = OTHER; note = 2'-O-Methyl nucleotide
  modified_base 6: mod_base = OTHER; note = 2'-fluoro nucleotide
  modified_base 7: mod_base = OTHER; note = 2'-O-Methyl nucleotide
  modified_base 8: mod_base = OTHER; note = 2'-fluoro nucleotide
  modified_base 9: mod_base = OTHER; note = 2'-O-Methyl nucleotide
  modified_base 10: mod_base = OTHER; note = 2'-fluoro nucleotide
  modified_base 11: mod_base = OTHER; note = 2'-O-Methyl nucleotide
  modified_base 12: mod_base = OTHER; note = 2'-fluoro nucleotide
  modified_base 13: mod_base = OTHER; note = 2'-O-Methyl nucleotide
  modified_base 14: mod_base = OTHER; note = 2'-fluoro nucleotide
  modified_base 15: mod_base = OTHER; note = 2'-O-Methyl nucleotide
  modified_base 16: mod_base = OTHER; note = 2'-fluoro nucleotide
  modified_base 17: mod_base = OTHER; note = 2'-O-Methyl nucleotide
  modified_base 18: mod_base = OTHER; note = 2'-fluoro nucleotide
  modified_base 19: mod_base = OTHER; note = 2'-O-Methyl nucleotide
  modified_base 20: mod_base = OTHER; note = deoxy-thymine phosphorothioate
  misc_feature 1..19: note = RNA
  misc_feature 20..21: note = DNA
agctgtatttgccctcgggtt

SEQ ID NO: 1706 - DNA, 21 bp, synthetic construct
  misc_feature 1..21: note = Description of Artificial Sequence: Synthetic oligonucleotide
  source 1..21: mol_type = other DNA
  modified_base 1: mod_base = OTHER; note = 2'-O-Methyl nucleotide
  modified_base 2: mod_base = OTHER; note = 2'-O-Methyl nucleotide
  modified_base 3: mod_base = OTHER; note = 2'-fluoro nucleotide
  modified_base 4: mod_base = OTHER; note = 2'-O-Methyl nucleotide
  modified_base 5: mod_base = OTHER; note = 2'-fluoro nucleotide
  modified_base 6: mod_base = OTHER; note = 2'-O-Methyl nucleotide
  modified_base 7: mod_base = OTHER; note = 2'-fluoro nucleotide
  modified_base 8: mod_base = OTHER; note = 2'-O-Methyl nucleotide
  modified_base 9: mod_base = OTHER; note = 2'-fluoro nucleotide
  modified_base 10: mod_base = OTHER; note = 2'-O-Methyl nucleotide
  modified_base 11: mod_base = OTHER; note = 2'-fluoro nucleotide
  modified_base 12: mod_base = OTHER; note = 2'-O-Methyl nucleotide
  modified_base 13: mod_base = OTHER; note = 2'-fluoro nucleotide
  modified_base 14: mod_base = OTHER; note = 2'-O-Methyl nucleotide
  modified_base 15: mod_base = OTHER; note = 2'-fluoro nucleotide
  modified_base 16: mod_base = OTHER; note = 2'-O-Methyl nucleotide
  modified_base 17: mod_base = OTHER; note = 2'-fluoro nucleotide
  modified_base 18: mod_base = OTHER; note = 2'-O-Methyl nucleotide
  modified_base 19: mod_base = OTHER; note = 2'-fluoro nucleotide
  modified_base 20: mod_base = OTHER; note = deoxy-thymine phosphorothioate
  misc_feature 1..19: note = RNA
  misc_feature 20..21: note = DNA
ccgagggcaaatacagctttt

SEQ ID NO: 1707 - DNA, 21 bp, synthetic construct
  misc_feature 1..21: note = Description of Artificial Sequence: Synthetic oligonucleotide
  source 1..21: mol_type = other DNA
  modified_base 1: mod_base = OTHER; note = 2'-fluoro nucleotide
  modified_base 2: mod_base = OTHER; note = 2'-fluoro nucleotide
  modified_base 3: mod_base = OTHER; note = 2'-O-Methyl nucleotide
  modified_base 4: mod_base = OTHER; note = 2'-fluoro nucleotide
  modified_base 5: mod_base = OTHER; note = 2'-O-Methyl nucleotide
  modified_base 6: mod_base = OTHER; note = 2'-fluoro nucleotide
  modified_base 7: mod_base = OTHER; note = 2'-O-Methyl nucleotide
  modified_base 8: mod_base = OTHER; note = 2'-fluoro nucleotide
  modified_base 9: mod_base = OTHER; note = 2'-O-Methyl nucleotide
  modified_base 10: mod_base = OTHER; note = 2'-fluoro nucleotide
  modified_base 11: mod_base = OTHER; note = 2'-O-Methyl nucleotide
  modified_base 12: mod_base = OTHER; note = 2'-fluoro nucleotide
  modified_base 13: mod_base = OTHER; note = 2'-O-Methyl nucleotide
  modified_base 14: mod_base = OTHER; note = 2'-fluoro nucleotide
  modified_base 15: mod_base = OTHER; note = 2'-O-Methyl nucleotide
  modified_base 16: mod_base = OTHER; note = 2'-fluoro nucleotide
  modified_base 17: mod_base = OTHER; note = 2'-O-Methyl nucleotide
  modified_base 18: mod_base = OTHER; note = 2'-fluoro nucleotide
  modified_base 19: mod_base = OTHER; note = 2'-O-Methyl nucleotide
  modified_base 20: mod_base = OTHER; note = deoxy-thymine phosphorothioate
  misc_feature 1..19: note = RNA
  misc_feature 20..21: note = DNA
aagctgtatttgccctcggtt

SEQ ID NO: 1708 - DNA, 21 bp, synthetic construct
  misc_feature 1..21: note = Description of Artificial Sequence: Synthetic oligonucleotide
  source 1..21: mol_type = other DNA
  modified_base 1: mod_base = OTHER; note = 2'-O-Methyl nucleotide
  modified_base 2: mod_base = OTHER; note = 2'-O-Methyl nucleotide
  modified_base 3: mod_base = OTHER; note = 2'-fluoro nucleotide
  modified_base 4: mod_base = OTHER; note = 2'-O-Methyl nucleotide
  modified_base 5: mod_base = OTHER; note = 2'-fluoro nucleotide
  modified_base 6: mod_base = OTHER; note = 2'-O-Methyl nucleotide
  modified_base 7: mod_base = OTHER; note = 2'-fluoro nucleotide
  modified_base 8: mod_base = OTHER; note = 2'-O-Methyl nucleotide
  modified_base 9: mod_base = OTHER; note = 2'-fluoro nucleotide
  modified_base 10: mod_base = OTHER; note = 2'-O-Methyl nucleotide
  modified_base 11: mod_base = OTHER; note = 2'-fluoro nucleotide
  modified_base 12: mod_base = OTHER; note = 2'-O-Methyl nucleotide
  modified_base 13: mod_base = OTHER; note = 2'-fluoro nucleotide
  modified_base 14: mod_base = OTHER; note = 2'-O-Methyl nucleotide
  modified_base 15: mod_base = OTHER; note = 2'-fluoro nucleotide
  modified_base 16: mod_base = OTHER; note = 2'-O-Methyl nucleotide
  modified_base 17: mod_base = OTHER; note = 2'-fluoro nucleotide
  modified_base 18: mod_base = OTHER; note = 2'-O-Methyl nucleotide
  modified_base 19: mod_base = OTHER; note = 2'-fluoro nucleotide
  modified_base 20: mod_base = OTHER; note = deoxy-thymine phosphorothioate
  misc_feature 1..19: note = RNA
  misc_feature 20..21: note = DNA
cgagggcaaatacagcttttt

SEQ ID NO: 1709 - DNA, 21 bp, synthetic construct
  misc_feature 1..21: note = Description of Artificial Sequence: Synthetic oligonucleotide
  source 1..21: mol_type = other DNA
  modified_base 1: mod_base = OTHER; note = 2'-fluoro nucleotide
  modified_base 2: mod_base = OTHER; note = 2'-fluoro nucleotide
  modified_base 3: mod_base = OTHER; note = 2'-O-Methyl nucleotide
  modified_base 4: mod_base = OTHER; note = 2'-fluoro nucleotide
  modified_base 5: mod_base = OTHER; note = 2'-O-Methyl nucleotide
  modified_base 6: mod_base = OTHER; note = 2'-fluoro nucleotide
  modified_base 7: mod_base = OTHER; note = 2'-O-Methyl nucleotide
  modified_base 8: mod_base = OTHER; note = 2'-fluoro nucleotide
  modified_base 9: mod_base = OTHER; note = 2'-O-Methyl nucleotide
  modified_base 10: mod_base = OTHER; note = 2'-fluoro nucleotide
  modified_base 11: mod_base = OTHER; note = 2'-O-Methyl nucleotide
  modified_base 12: mod_base = OTHER; note = 2'-fluoro nucleotide
  modified_base 13: mod_base = OTHER; note = 2'-O-Methyl nucleotide
  modified_base 14: mod_base = OTHER; note = 2'-fluoro nucleotide
  modified_base 15: mod_base = OTHER; note = 2'-O-Methyl nucleotide
  modified_base 16: mod_base = OTHER; note = 2'-fluoro nucleotide
  modified_base 17: mod_base = OTHER; note = 2'-O-Methyl nucleotide
  modified_base 18: mod_base = OTHER; note = 2'-fluoro nucleotide
  modified_base 19: mod_base = OTHER; note = 2'-O-Methyl nucleotide
  modified_base 20: mod_base = OTHER; note = deoxy-thymine phosphorothioate
  misc_feature 1..19: note = RNA
  misc_feature 20..21: note = DNA
aaagctgtatttgccctcgtt

SEQ ID NO: 1710 - DNA, 21 bp, synthetic construct
  misc_feature 1..21: note = Description of Artificial Sequence: Synthetic oligonucleotide
  source 1..21: mol_type = other DNA
  modified_base 1: mod_base = OTHER; note = 2'-O-Methyl nucleotide
  modified_base 2: mod_base = OTHER; note = 2'-O-Methyl nucleotide
  modified_base 3: mod_base = OTHER; note = 2'-fluoro nucleotide
  modified_base 4: mod_base = OTHER; note = 2'-O-Methyl nucleotide
  modified_base 5: mod_base = OTHER; note = 2'-fluoro nucleotide
  modified_base 6: mod_base = OTHER; note = 2'-O-Methyl nucleotide
  modified_base 7: mod_base = OTHER; note = 2'-fluoro nucleotide
  modified_base 8: mod_base = OTHER; note = 2'-O-Methyl nucleotide
  modified_base 9: mod_base = OTHER; note = 2'-fluoro nucleotide
  modified_base 10: mod_base = OTHER; note = 2'-O-Methyl nucleotide
  modified_base 11: mod_base = OTHER; note = 2'-fluoro nucleotide
  modified_base 12: mod_base = OTHER; note = 2'-O-Methyl nucleotide
  modified_base 13: mod_base = OTHER; note = 2'-fluoro nucleotide
  modified_base 14: mod_base = OTHER; note = 2'-O-Methyl nucleotide
  modified_base 15: mod_base = OTHER; note = 2'-fluoro nucleotide
  modified_base 16: mod_base = OTHER; note = 2'-O-Methyl nucleotide
  modified_base 17: mod_base = OTHER; note = 2'-fluoro nucleotide
  modified_base 18: mod_base = OTHER; note = 2'-O-Methyl nucleotide
  modified_base 19: mod_base = OTHER; note = 2'-fluoro nucleotide
  modified_base 20: mod_base = OTHER; note = deoxy-thymine phosphorothioate
  misc_feature 1..19: note = RNA
  misc_feature 20..21: note = DNA
aaatacagctttggtgccatt

SEQ ID NO: 1711 - DNA, 21 bp, synthetic construct
  misc_feature 1..21: note = Description of Artificial Sequence: Synthetic oligonucleotide
  source 1..21: mol_type = other DNA
  modified_base 1: mod_base = OTHER; note = 2'-fluoro nucleotide
  modified_base 2: mod_base = OTHER; note = 2'-fluoro nucleotide
  modified_base 3: mod_base = OTHER; note = 2'-O-Methyl nucleotide
  modified_base 4: mod_base = OTHER; note = 2'-fluoro nucleotide
  modified_base 5: mod_base = OTHER; note = 2'-O-Methyl nucleotide
  modified_base 6: mod_base = OTHER; note = 2'-fluoro nucleotide
  modified_base 7: mod_base = OTHER; note = 2'-O-Methyl nucleotide
  modified_base 8: mod_base = OTHER; note = 2'-fluoro nucleotide
  modified_base 9: mod_base = OTHER; note = 2'-O-Methyl nucleotide
  modified_base 10: mod_base = OTHER; note = 2'-fluoro nucleotide
  modified_base 11: mod_base = OTHER; note = 2'-O-Methyl nucleotide
  modified_base 12: mod_base = OTHER; note = 2'-fluoro nucleotide
  modified_base 13: mod_base = OTHER; note = 2'-O-Methyl nucleotide
  modified_base 14: mod_base = OTHER; note = 2'-fluoro nucleotide
  modified_base 15: mod_base = OTHER; note = 2'-O-Methyl nucleotide
  modified_base 16: mod_base = OTHER; note = 2'-fluoro nucleotide
  modified_base 17: mod_base = OTHER; note = 2'-O-Methyl nucleotide
  modified_base 18: mod_base = OTHER; note = 2'-fluoro nucleotide
  modified_base 19: mod_base = OTHER; note = 2'-O-Methyl nucleotide
  modified_base 20: mod_base = OTHER; note = deoxy-thymine phosphorothioate
  misc_feature 1..19: note = RNA
  misc_feature 20..21: note = DNA
tggcaccaaagctgtattttt

SEQ ID NO: 1712 - DNA, 21 bp, synthetic construct
  misc_feature 1..21: note = Description of Artificial Sequence: Synthetic oligonucleotide
  source 1..21: mol_type = other DNA
  modified_base 1: mod_base = OTHER; note = 2'-O-Methyl nucleotide
  modified_base 2: mod_base = OTHER; note = 2'-O-Methyl nucleotide
  modified_base 3: mod_base = OTHER; note = 2'-fluoro nucleotide
  modified_base 4: mod_base = OTHER; note = 2'-O-Methyl nucleotide
  modified_base 5: mod_base = OTHER; note = 2'-fluoro nucleotide
  modified_base 6: mod_base = OTHER; note = 2'-O-Methyl nucleotide
  modified_base 7: mod_base = OTHER; note = 2'-fluoro nucleotide
  modified_base 8: mod_base = OTHER; note = 2'-O-Methyl nucleotide
  modified_base 9: mod_base = OTHER; note = 2'-fluoro nucleotide
  modified_base 10: mod_base = OTHER; note = 2'-O-Methyl nucleotide
  modified_base 11: mod_base = OTHER; note = 2'-fluoro nucleotide
  modified_base 12: mod_base = OTHER; note = 2'-O-Methyl nucleotide
  modified_base 13: mod_base = OTHER; note = 2'-fluoro nucleotide
  modified_base 14: mod_base = OTHER; note = 2'-O-Methyl nucleotide
  modified_base 15: mod_base = OTHER; note = 2'-fluoro nucleotide
  modified_base 16: mod_base = OTHER; note = 2'-O-Methyl nucleotide
  modified_base 17: mod_base = OTHER; note = 2'-fluoro nucleotide
  modified_base 18: mod_base = OTHER; note = 2'-O-Methyl nucleotide
  modified_base 19: mod_base = OTHER; note = 2'-fluoro nucleotide
  modified_base 20: mod_base = OTHER; note = deoxy-thymine phosphorothioate
  misc_feature 1..19: note = RNA
  misc_feature 20..21: note = DNA
aatacagctttggtgccactt

SEQ ID NO: 1713 - DNA, 21 bp, synthetic construct
  misc_feature 1..21: note = Description of Artificial Sequence: Synthetic oligonucleotide
  source 1..21: mol_type = other DNA
  modified_base 1: mod_base = OTHER; note = 2'-fluoro nucleotide
  modified_base 2: mod_base = OTHER; note = 2'-fluoro nucleotide
  modified_base 3: mod_base = OTHER; note = 2'-O-Methyl nucleotide
  modified_base 4: mod_base = OTHER; note = 2'-fluoro nucleotide
  modified_base 5: mod_base = OTHER; note = 2'-O-Methyl nucleotide
  modified_base 6: mod_base = OTHER; note = 2'-fluoro nucleotide
  modified_base 7: mod_base = OTHER; note = 2'-O-Methyl nucleotide
  modified_base 8: mod_base = OTHER; note = 2'-fluoro nucleotide
  modified_base 9: mod_base = OTHER; note = 2'-O-Methyl nucleotide
  modified_base 10: mod_base = OTHER; note = 2'-fluoro nucleotide
  modified_base 11: mod_base = OTHER; note = 2'-O-Methyl nucleotide
  modified_base 12: mod_base = OTHER; note = 2'-fluoro nucleotide
  modified_base 13: mod_base = OTHER; note = 2'-O-Methyl nucleotide
  modified_base 14: mod_base = OTHER; note = 2'-fluoro nucleotide
  modified_base 15: mod_base = OTHER; note = 2'-O-Methyl nucleotide
  modified_base 16: mod_base = OTHER; note = 2'-fluoro nucleotide
  modified_base 17: mod_base = OTHER; note = 2'-O-Methyl nucleotide
  modified_base 18: mod_base = OTHER; note = 2'-fluoro nucleotide
  modified_base 19: mod_base = OTHER; note = 2'-O-Methyl nucleotide
  modified_base 20: mod_base = OTHER; note = deoxy-thymine phosphorothioate
  misc_feature 1..19: note = RNA
  misc_feature 20..21: note = DNA
gtggcaccaaagctgtatttt

SEQ ID NO: 1714 - DNA, 21 bp, synthetic construct
  misc_feature 1..21: note = Description of Artificial Sequence: Synthetic oligonucleotide
  source 1..21: mol_type = other DNA
  modified_base 1: mod_base = OTHER; note = 2'-O-Methyl nucleotide
  modified_base 2: mod_base = OTHER; note = 2'-O-Methyl nucleotide
  modified_base 3: mod_base = OTHER; note = 2'-fluoro nucleotide
  modified_base 4: mod_base = OTHER; note = 2'-O-Methyl nucleotide
  modified_base 5: mod_base = OTHER; note = 2'-fluoro nucleotide
  modified_base 6: mod_base = OTHER; note = 2'-O-Methyl nucleotide
  modified_base 7: mod_base = OTHER; note = 2'-fluoro nucleotide
  modified_base 8: mod_base = OTHER; note = 2'-O-Methyl nucleotide
  modified_base 9: mod_base = OTHER; note = 2'-fluoro nucleotide
  modified_base 10: mod_base = OTHER; note = 2'-O-Methyl nucleotide
  modified_base 11: mod_base = OTHER; note = 2'-fluoro nucleotide
  modified_base 12: mod_base = OTHER; note = 2'-O-Methyl nucleotide
  modified_base 13: mod_base = OTHER; note = 2'-fluoro nucleotide
  modified_base 14: mod_base = OTHER; note = 2'-O-Methyl nucleotide
  modified_base 15: mod_base = OTHER; note = 2'-fluoro nucleotide
  modified_base 16: mod_base = OTHER; note = 2'-O-Methyl nucleotide
  modified_base 17: mod_base = OTHER; note = 2'-fluoro nucleotide
  modified_base 18: mod_base = OTHER; note = 2'-O-Methyl nucleotide
  modified_base 19: mod_base = OTHER; note = 2'-fluoro nucleotide
  modified_base 20: mod_base = OTHER; note = deoxy-thymine phosphorothioate
  misc_feature 1..19: note = RNA
  misc_feature 20..21: note = DNA
atacagctttggtgccacctt

SEQ ID NO: 1715 - DNA, 21 bp, synthetic construct
  misc_feature 1..21: note = Description of Artificial Sequence: Synthetic oligonucleotide
  source 1..21: mol_type = other DNA
  modified_base 1: mod_base = OTHER; note = 2'-fluoro nucleotide
  modified_base 2: mod_base = OTHER; note = 2'-fluoro nucleotide
  modified_base 3: mod_base = OTHER; note = 2'-O-Methyl nucleotide
  modified_base 4: mod_base = OTHER; note = 2'-fluoro nucleotide
  modified_base 5: mod_base = OTHER; note = 2'-O-Methyl nucleotide
  modified_base 6: mod_base = OTHER; note = 2'-fluoro nucleotide
  modified_base 7: mod_base = OTHER; note = 2'-O-Methyl nucleotide
  modified_base 8: mod_base = OTHER; note = 2'-fluoro nucleotide
  modified_base 9: mod_base = OTHER; note = 2'-O-Methyl nucleotide
  modified_base 10: mod_base = OTHER; note = 2'-fluoro nucleotide
  modified_base 11: mod_base = OTHER; note = 2'-O-Methyl nucleotide
  modified_base 12: mod_base = OTHER; note = 2'-fluoro nucleotide
  modified_base 13: mod_base = OTHER; note = 2'-O-Methyl nucleotide
  modified_base 14: mod_base = OTHER; note = 2'-fluoro nucleotide
  modified_base 15: mod_base = OTHER; note = 2'-O-Methyl nucleotide
  modified_base 16: mod_base = OTHER; note = 2'-fluoro nucleotide
  modified_base 17: mod_base = OTHER; note = 2'-O-Methyl nucleotide
  modified_base 18: mod_base = OTHER; note = 2'-fluoro nucleotide
  modified_base 19: mod_base = OTHER; note = 2'-O-Methyl nucleotide
  modified_base 20: mod_base = OTHER; note = deoxy-thymine phosphorothioate
  misc_feature 1..19: note = RNA
  misc_feature 20..21: note = DNA
ggtggcaccaaagctgtattt

SEQ ID NO: 1716 - DNA, 21 bp, synthetic construct
  misc_feature 1..21: note = Description of Artificial Sequence: Synthetic oligonucleotide
  source 1..21: mol_type = other DNA
  modified_base 1: mod_base = OTHER; note = 2'-O-Methyl nucleotide
  modified_base 2: mod_base = OTHER; note = 2'-O-Methyl nucleotide
  modified_base 3: mod_base = OTHER; note = 2'-fluoro nucleotide
  modified_base 4: mod_base = OTHER; note = 2'-O-Methyl nucleotide
  modified_base 5: mod_base = OTHER; note = 2'-fluoro nucleotide
  modified_base 6: mod_base = OTHER; note = 2'-O-Methyl nucleotide
  modified_base 7: mod_base = OTHER; note = 2'-fluoro nucleotide
  modified_base 8: mod_base = OTHER; note = 2'-O-Methyl nucleotide
  modified_base 9: mod_base = OTHER; note = 2'-fluoro nucleotide
  modified_base 10: mod_base = OTHER; note = 2'-O-Methyl nucleotide
  modified_base 11: mod_base = OTHER; note = 2'-fluoro nucleotide
  modified_base 12: mod_base = OTHER; note = 2'-O-Methyl nucleotide
  modified_base 13: mod_base = OTHER; note = 2'-fluoro nucleotide
  modified_base 14: mod_base = OTHER; note = 2'-O-Methyl nucleotide
  modified_base 15: mod_base = OTHER; note = 2'-fluoro nucleotide
  modified_base 16: mod_base = OTHER; note = 2'-O-Methyl nucleotide
  modified_base 17: mod_base = OTHER; note = 2'-fluoro nucleotide
  modified_base 18: mod_base = OTHER; note = 2'-O-Methyl nucleotide
  modified_base 19: mod_base = OTHER; note = 2'-fluoro nucleotide
  modified_base 20: mod_base = OTHER; note = deoxy-thymine phosphorothioate
  misc_feature 1..19: note = RNA
  misc_feature 20..21: note = DNA
ctttggtgccacctgcgtgtt

SEQ ID NO: 1717 - DNA, 21 bp, synthetic construct
  misc_feature 1..21: note = Description of Artificial Sequence: Synthetic oligonucleotide
  source 1..21: mol_type = other DNA
  modified_base 1: mod_base = OTHER; note = 2'-fluoro nucleotide
  modified_base 2: mod_base = OTHER; note = 2'-fluoro nucleotide
  modified_base 3: mod_base = OTHER; note = 2'-O-Methyl nucleotide
  modified_base 4: mod_base = OTHER; note = 2'-fluoro nucleotide
  modified_base 5: mod_base = OTHER; note = 2'-O-Methyl nucleotide
  modified_base 6: mod_base = OTHER; note = 2'-fluoro nucleotide
  modified_base 7: mod_base = OTHER; note = 2'-O-Methyl nucleotide
  modified_base 8: mod_base = OTHER; note = 2'-fluoro nucleotide
  modified_base 9: mod_base = OTHER; note = 2'-O-Methyl nucleotide
  modified_base 10: mod_base = OTHER; note = 2'-fluoro nucleotide
  modified_base 11: mod_base = OTHER; note = 2'-O-Methyl nucleotide
  modified_base 12: mod_base = OTHER; note = 2'-fluoro nucleotide
  modified_base 13: mod_base = OTHER; note = 2'-O-Methyl nucleotide
  modified_base 14: mod_base = OTHER; note = 2'-fluoro nucleotide
  modified_base 15: mod_base = OTHER; note = 2'-O-Methyl nucleotide
  modified_base 16: mod_base = OTHER; note = 2'-fluoro nucleotide
  modified_base 17: mod_base = OTHER; note = 2'-O-Methyl nucleotide
  modified_base 18: mod_base = OTHER; note = 2'-fluoro nucleotide
  modified_base 19: mod_base = OTHER; note = 2'-O-Methyl nucleotide
  modified_base 20: mod_base = OTHER; note = deoxy-thymine phosphorothioate
  misc_feature 1..19: note = RNA
  misc_feature 20..21: note = DNA
cacgcaggtggcaccaaagtt

SEQ ID NO: 1718 - DNA, 21 bp, synthetic construct
  misc_feature 1..21: note = Description of Artificial Sequence: Synthetic oligonucleotide
  source 1..21: mol_type = other DNA
  modified_base 1: mod_base = OTHER; note = 2'-O-Methyl nucleotide
  modified_base 2: mod_base = OTHER; note = 2'-O-Methyl nucleotide
  modified_base 3: mod_base = OTHER; note = 2'-fluoro nucleotide
  modified_base 4: mod_base = OTHER; note = 2'-O-Methyl nucleotide
  modified_base 5: mod_base = OTHER; note = 2'-fluoro nucleotide
  modified_base 6: mod_base = OTHER; note = 2'-O-Methyl nucleotide
  modified_base 7: mod_base = OTHER; note = 2'-fluoro nucleotide
  modified_base 8: mod_base = OTHER; note = 2'-O-Methyl nucleotide
  modified_base 9: mod_base = OTHER; note = 2'-fluoro nucleotide
  modified_base 10: mod_base = OTHER; note = 2'-O-Methyl nucleotide
  modified_base 11: mod_base = OTHER; note = 2'-fluoro nucleotide
  modified_base 12: mod_base = OTHER; note = 2'-O-Methyl nucleotide
  modified_base 13: mod_base = OTHER; note = 2'-fluoro nucleotide
  modified_base 14: mod_base = OTHER; note = 2'-O-Methyl nucleotide
  modified_base 15: mod_base = OTHER; note = 2'-fluoro nucleotide
  modified_base 16: mod_base = OTHER; note = 2'-O-Methyl nucleotide
  modified_base 17: mod_base = OTHER; note = 2'-fluoro nucleotide
  modified_base 18: mod_base = OTHER; note = 2'-O-Methyl nucleotide
  modified_base 19: mod_base = OTHER; note = 2'-fluoro nucleotide
  modified_base 20: mod_base = OTHER; note = deoxy-thymine phosphorothioate
  misc_feature 1..19: note = RNA
  misc_feature 20..21: note = DNA
ttggtgccacctgcgtgaatt

SEQ ID NO: 1719 - DNA, 21 bp, synthetic construct
  misc_feature 1..21: note = Description of Artificial Sequence: Synthetic oligonucleotide
  source 1..21: mol_type = other DNA
  modified_base 1: mod_base = OTHER; note = 2'-fluoro nucleotide
  modified_base 2: mod_base = OTHER; note = 2'-fluoro nucleotide
  modified_base 3: mod_base = OTHER; note = 2'-O-Methyl nucleotide
  modified_base 4: mod_base = OTHER; note = 2'-fluoro nucleotide
  modified_base 5: mod_base = OTHER; note = 2'-O-Methyl nucleotide
  modified_base 6: mod_base = OTHER; note = 2'-fluoro nucleotide
  modified_base 7: mod_base = OTHER; note = 2'-O-Methyl nucleotide
  modified_base 8: mod_base = OTHER; note = 2'-fluoro nucleotide
  modified_base 9: mod_base = OTHER; note = 2'-O-Methyl nucleotide
  modified_base 10: mod_base = OTHER; note = 2'-fluoro nucleotide
  modified_base 11: mod_base = OTHER; note = 2'-O-Methyl nucleotide
  modified_base 12: mod_base = OTHER; note = 2'-fluoro nucleotide
  modified_base 13: mod_base = OTHER; note = 2'-O-Methyl nucleotide
  modified_base 14: mod_base = OTHER; note = 2'-fluoro nucleotide
  modified_base 15: mod_base = OTHER; note = 2'-O-Methyl nucleotide
  modified_base 16: mod_base = OTHER; note = 2'-fluoro nucleotide
  modified_base 17: mod_base = OTHER; note = 2'-O-Methyl nucleotide
  modified_base 18: mod_base = OTHER; note = 2'-fluoro nucleotide
  modified_base 19: mod_base = OTHER; note = 2'-O-Methyl nucleotide
  modified_base 20: mod_base = OTHER; note = deoxy-thymine phosphorothioate
  misc_feature 1..19: note = RNA
  misc_feature 20..21: note = DNA
ttcacgcaggtggcaccaatt

SEQ ID NO: 1720 - DNA, 21 bp, synthetic construct
  misc_feature 1..21: note = Description of Artificial Sequence: Synthetic oligonucleotide
  source 1..21: mol_type = other DNA
  modified_base 1: mod_base = OTHER; note = 2'-O-Methyl nucleotide
  modified_base 2: mod_base = OTHER; note = 2'-O-Methyl nucleotide
  modified_base 3: mod_base = OTHER; note = 2'-fluoro nucleotide
  modified_base 4: mod_base = OTHER; note = 2'-O-Methyl nucleotide
  modified_base 5: mod_base = OTHER; note = 2'-fluoro nucleotide
  modified_base 6: mod_base = OTHER; note = 2'-O-Methyl nucleotide
  modified_base 7: mod_base = OTHER; note = 2'-fluoro nucleotide
  modified_base 8: mod_base = OTHER; note = 2'-O-Methyl nucleotide
  modified_base 9: mod_base = OTHER; note = 2'-fluoro nucleotide
  modified_base 10: mod_base = OTHER; note = 2'-O-Methyl nucleotide
  modified_base 11: mod_base = OTHER; note = 2'-fluoro nucleotide
  modified_base 12: mod_base = OTHER; note = 2'-O-Methyl nucleotide
  modified_base 13: mod_base = OTHER; note = 2'-fluoro nucleotide
  modified_base 14: mod_base = OTHER; note = 2'-O-Methyl nucleotide
  modified_base 15: mod_base = OTHER; note = 2'-fluoro nucleotide
  modified_base 16: mod_base = OTHER; note = 2'-O-Methyl nucleotide
  modified_base 17: mod_base = OTHER; note = 2'-fluoro nucleotide
  modified_base 18: mod_base = OTHER; note = 2'-O-Methyl nucleotide
  modified_base 19: mod_base = OTHER; note = 2'-fluoro nucleotide
  modified_base 20: mod_base = OTHER; note = deoxy-thymine phosphorothioate
  misc_feature 1..19: note = RNA
  misc_feature 20..21: note = DNA
ccacctgcgtgaagaagtgtt

SEQ ID NO: 1721 - DNA, 21 bp, synthetic construct
  misc_feature 1..21: note = Description of Artificial Sequence: Synthetic oligonucleotide
  source 1..21: mol_type = other DNA
  modified_base 1: mod_base = OTHER; note = 2'-fluoro nucleotide
  modified_base 2: mod_base = OTHER; note = 2'-fluoro nucleotide
  modified_base 3: mod_base = OTHER; note = 2'-O-Methyl nucleotide
  modified_base 4: mod_base = OTHER; note = 2'-fluoro nucleotide
  modified_base 5: mod_base = OTHER; note = 2'-O-Methyl nucleotide
  modified_base 6: mod_base = OTHER; note = 2'-fluoro nucleotide
  modified_base 7: mod_base = OTHER; note = 2'-O-Methyl nucleotide
  modified_base 8: mod_base = OTHER; note = 2'-fluoro nucleotide
  modified_base 9: mod_base = OTHER; note = 2'-O-Methyl nucleotide
  modified_base 10: mod_base = OTHER; note = 2'-fluoro nucleotide
  modified_base 11: mod_base = OTHER; note = 2'-O-Methyl nucleotide
  modified_base 12: mod_base = OTHER; note = 2'-fluoro nucleotide
  modified_base 13: mod_base = OTHER; note = 2'-O-Methyl nucleotide
  modified_base 14: mod_base = OTHER; note = 2'-fluoro nucleotide
  modified_base 15: mod_base = OTHER; note = 2'-O-Methyl nucleotide
  modified_base 16: mod_base = OTHER; note = 2'-fluoro nucleotide
  modified_base 17: mod_base = OTHER; note = 2'-O-Methyl nucleotide
  modified_base 18: mod_base = OTHER; note = 2'-fluoro nucleotide
  modified_base 19: mod_base = OTHER; note = 2'-O-Methyl nucleotide
  modified_base 20: mod_base = OTHER; note = deoxy-thymine phosphorothioate
  misc_feature 1..19: note = RNA
  misc_feature 20..21: note = DNA
cacttcttcacgcaggtggtt

SEQ ID NO: 1722 - DNA, 21 bp, synthetic construct
  misc_feature 1..21: note = Description of Artificial Sequence: Synthetic oligonucleotide
  source 1..21: mol_type = other DNA
  modified_base 1: mod_base = OTHER; note = 2'-O-Methyl nucleotide
  modified_base 2: mod_base = OTHER; note = 2'-O-Methyl nucleotide
  modified_base 3: mod_base = OTHER; note = 2'-fluoro nucleotide
  modified_base 4: mod_base = OTHER; note = 2'-O-Methyl nucleotide
  modified_base 5: mod_base = OTHER; note = 2'-fluoro nucleotide
  modified_base 6: mod_base = OTHER; note = 2'-O-Methyl nucleotide
  modified_base 7: mod_base = OTHER; note = 2'-fluoro nucleotide
  modified_base 8: mod_base = OTHER; note = 2'-O-Methyl nucleotide
  modified_base 9: mod_base = OTHER; note = 2'-fluoro nucleotide
  modified_base 10: mod_base = OTHER; note = 2'-O-Methyl nucleotide
  modified_base 11: mod_base = OTHER; note = 2'-fluoro nucleotide
  modified_base 12: mod_base = OTHER; note = 2'-O-Methyl nucleotide
  modified_base 13: mod_base = OTHER; note = 2'-fluoro nucleotide
  modified_base 14: mod_base = OTHER; note = 2'-O-Methyl nucleotide
  modified_base 15: mod_base = OTHER; note = 2'-fluoro nucleotide
  modified_base 16: mod_base = OTHER; note = 2'-O-Methyl nucleotide
  modified_base 17: mod_base = OTHER; note = 2'-fluoro nucleotide
  modified_base 18: mod_base = OTHER; note = 2'-O-Methyl nucleotide
  modified_base 19: mod_base = OTHER; note = 2'-fluoro nucleotide
  modified_base 20: mod_base = OTHER; note = deoxy-thymine phosphorothioate
  misc_feature 1..19: note = RNA
  misc_feature 20..21: note = DNA
ctgcgtgaagaagtgtccctt

SEQ ID NO: 1723 - DNA, 21 bp, synthetic construct
  misc_feature 1..21: note = Description of Artificial Sequence: Synthetic oligonucleotide
  source 1..21: mol_type = other DNA
  modified_base 1: mod_base = OTHER; note = 2'-fluoro nucleotide
  modified_base 2: mod_base = OTHER; note = 2'-fluoro nucleotide
  modified_base 3: mod_base = OTHER; note = 2'-O-Methyl nucleotide
  modified_base 4: mod_base = OTHER; note = 2'-fluoro nucleotide
  modified_base 5: mod_base = OTHER; note = 2'-O-Methyl nucleotide
  modified_base 6: mod_base = OTHER; note = 2'-fluoro nucleotide
  modified_base 7: mod_base = OTHER; note = 2'-O-Methyl nucleotide
  modified_base 8: mod_base = OTHER; note = 2'-fluoro nucleotide
  modified_base 9: mod_base = OTHER; note = 2'-O-Methyl nucleotide
  modified_base 10: mod_base = OTHER; note = 2'-fluoro nucleotide
  modified_base 11: mod_base = OTHER; note = 2'-O-Methyl nucleotide
  modified_base 12: mod_base = OTHER; note = 2'-fluoro nucleotide
  modified_base 13: mod_base = OTHER; note = 2'-O-Methyl nucleotide
  modified_base 14: mod_base = OTHER; note = 2'-fluoro nucleotide
  modified_base 15: mod_base = OTHER; note = 2'-O-Methyl nucleotide
  modified_base 16: mod_base = OTHER; note = 2'-fluoro nucleotide
  modified_base 17: mod_base = OTHER; note = 2'-O-Methyl nucleotide
  modified_base 18: mod_base = OTHER; note = 2'-fluoro nucleotide
  modified_base 19: mod_base = OTHER; note = 2'-O-Methyl nucleotide
  modified_base 20: mod_base = OTHER; note = deoxy-thymine phosphorothioate
  misc_feature 1..19: note = RNA
  misc_feature 20..21: note = DNA
gggacacttcttcacgcagtt

SEQ ID NO: 1724 - DNA, 21 bp, synthetic construct
  misc_feature 1..21: note = Description of Artificial Sequence: Synthetic oligonucleotide
  source 1..21: mol_type = other DNA
  modified_base 1: mod_base = OTHER; note = 2'-O-Methyl nucleotide
  modified_base 2: mod_base = OTHER; note = 2'-O-Methyl nucleotide
  modified_base 3: mod_base = OTHER; note = 2'-fluoro nucleotide
  modified_base 4: mod_base = OTHER; note = 2'-O-Methyl nucleotide
  modified_base 5: mod_base = OTHER; note = 2'-fluoro nucleotide
  modified_base 6: mod_base = OTHER; note = 2'-O-Methyl nucleotide
  modified_base 7: mod_base = OTHER; note = 2'-fluoro nucleotide
  modified_base 8: mod_base = OTHER; note = 2'-O-Methyl nucleotide
  modified_base 9: mod_base = OTHER; note = 2'-fluoro nucleotide
  modified_base 10: mod_base = OTHER; note = 2'-O-Methyl nucleotide
  modified_base 11: mod_base = OTHER; note = 2'-fluoro nucleotide
  modified_base 12: mod_base = OTHER; note = 2'-O-Methyl nucleotide
  modified_base 13: mod_base = OTHER; note = 2'-fluoro nucleotide
  modified_base 14: mod_base = OTHER; note = 2'-O-Methyl nucleotide
  modified_base 15: mod_base = OTHER; note = 2'-fluoro nucleotide
  modified_base 16: mod_base = OTHER; note = 2'-O-Methyl nucleotide
  modified_base 17: mod_base = OTHER; note = 2'-fluoro nucleotide
  modified_base 18: mod_base = OTHER; note = 2'-O-Methyl nucleotide
  modified_base 19: mod_base = OTHER; note = 2'-fluoro nucleotide
  modified_base 20: mod_base = OTHER; note = deoxy-thymine phosphorothioate
  misc_feature 1..19: note = RNA
  misc_feature 20..21: note = DNA
tgcgtgaagaagtgtcccctt

SEQ ID NO: 1725 - DNA, 21 bp, synthetic construct
  misc_feature 1..21: note = Description of Artificial Sequence: Synthetic oligonucleotide
  source 1..21: mol_type = other DNA
  modified_base 1: mod_base = OTHER; note = 2'-fluoro nucleotide
  modified_base 2: mod_base = OTHER; note = 2'-fluoro nucleotide
  modified_base 3: mod_base = OTHER; note = 2'-O-Methyl nucleotide
  modified_base 4: mod_base = OTHER; note = 2'-fluoro nucleotide
  modified_base 5: mod_base = OTHER; note = 2'-O-Methyl nucleotide
  modified_base 6: mod_base = OTHER; note = 2'-fluoro nucleotide
  modified_base 7: mod_base = OTHER; note = 2'-O-Methyl nucleotide
  modified_base 8: mod_base = OTHER; note = 2'-fluoro nucleotide
  modified_base 9: mod_base = OTHER; note = 2'-O-Methyl nucleotide
  modified_base 10: mod_base = OTHER; note = 2'-fluoro nucleotide
  modified_base 11: mod_base = OTHER; note = 2'-O-Methyl nucleotide
  modified_base 12: mod_base = OTHER; note = 2'-fluoro nucleotide
  modified_base 13: mod_base = OTHER; note = 2'-O-Methyl nucleotide
  modified_base 14: mod_base = OTHER; note = 2'-fluoro nucleotide
  modified_base 15: mod_base = OTHER; note = 2'-O-Methyl nucleotide
  modified_base 16: mod_base = OTHER; note = 2'-fluoro nucleotide
  modified_base 17: mod_base = OTHER; note = 2'-O-Methyl nucleotide
  modified_base 18: mod_base = OTHER; note = 2'-fluoro nucleotide
  modified_base 19: mod_base = OTHER; note = 2'-O-Methyl nucleotide
  modified_base 20: mod_base = OTHER; note = deoxy-thymine phosphorothioate
  misc_feature 1..19: note = RNA
  misc_feature 20..21: note = DNA
ggggacacttcttcacgcatt

SEQ ID NO: 1726 - DNA, 21 bp, synthetic construct
  misc_feature 1..21: note = Description of Artificial Sequence: Synthetic oligonucleotide
  source 1..21: mol_type = other DNA
  modified_base 1: mod_base = OTHER; note = 2'-O-Methyl nucleotide
  modified_base 2: mod_base = OTHER; note = 2'-O-Methyl nucleotide
  modified_base 3: mod_base = OTHER; note = 2'-fluoro nucleotide
  modified_base 4: mod_base = OTHER; note = 2'-O-Methyl nucleotide
  modified_base 5: mod_base = OTHER; note = 2'-fluoro nucleotide
  modified_base 6: mod_base = OTHER; note = 2'-O-Methyl nucleotide
  modified_base 7: mod_base = OTHER; note = 2'-fluoro nucleotide
  modified_base 8: mod_base = OTHER; note = 2'-O-Methyl nucleotide
  modified_base 9: mod_base = OTHER; note = 2'-fluoro nucleotide
  modified_base 10: mod_base = OTHER; note = 2'-O-Methyl nucleotide
  modified_base 11: mod_base = OTHER; note = 2'-fluoro nucleotide
  modified_base 12: mod_base = OTHER; note = 2'-O-Methyl nucleotide
  modified_base 13: mod_base = OTHER; note = 2'-fluoro nucleotide
  modified_base 14: mod_base = OTHER; note = 2'-O-Methyl nucleotide
  modified_base 15: mod_base = OTHER; note = 2'-fluoro nucleotide
  modified_base 16: mod_base = OTHER; note = 2'-O-Methyl nucleotide
  modified_base 17: mod_base = OTHER; note = 2'-fluoro nucleotide
  modified_base 18: mod_base = OTHER; note = 2'-O-Methyl nucleotide
  modified_base 19: mod_base = OTHER; note = 2'-fluoro nucleotide
  modified_base 20: mod_base = OTHER; note = deoxy-thymine phosphorothioate
  misc_feature 1..19: note = RNA
  misc_feature 20..21: note = DNA
gcgtgaagaagtgtccccgtt

SEQ ID NO: 1727 - DNA, 21 bp, synthetic construct
  misc_feature 1..21: note = Description of Artificial Sequence: Synthetic oligonucleotide
  source 1..21: mol_type = other DNA
  modified_base 1: mod_base = OTHER; note = 2'-fluoro nucleotide
  modified_base 2: mod_base = OTHER; note = 2'-fluoro nucleotide
  modified_base 3: mod_base = OTHER; note = 2'-O-Methyl nucleotide
  modified_base 4: mod_base = OTHER; note = 2'-fluoro nucleotide
  modified_base 5: mod_base = OTHER; note = 2'-O-Methyl nucleotide
  modified_base 6: mod_base = OTHER; note = 2'-fluoro nucleotide
  modified_base 7: mod_base = OTHER; note = 2'-O-Methyl nucleotide
  modified_base 8: mod_base = OTHER; note = 2'-fluoro nucleotide
  modified_base 9: mod_base = OTHER; note = 2'-O-Methyl nucleotide
  modified_base 10: mod_base = OTHER; note = 2'-fluoro nucleotide
  modified_base 11: mod_base = OTHER; note = 2'-O-Methyl nucleotide
  modified_base 12: mod_base = OTHER; note = 2'-fluoro nucleotide
  modified_base 13: mod_base = OTHER; note = 2'-O-Methyl nucleotide
  modified_base 14: mod_base = OTHER; note = 2'-fluoro nucleotide
  modified_base 15: mod_base = OTHER; note = 2'-O-Methyl nucleotide
  modified_base 16: mod_base = OTHER; note = 2'-fluoro nucleotide
  modified_base 17: mod_base = OTHER; note = 2'-O-Methyl nucleotide
  modified_base 18: mod_base = OTHER; note = 2'-fluoro nucleotide
  modified_base 19: mod_base = OTHER; note = 2'-O-Methyl nucleotide
  modified_base 20: mod_base = OTHER; note = deoxy-thymine phosphorothioate
  misc_feature 1..19: note = RNA
  misc_feature 20..21: note = DNA
cggggacacttcttcacgctt

SEQ ID NO: 1728 - DNA, 21 bp, synthetic construct
  misc_feature 1..21: note = Description of Artificial Sequence: Synthetic oligonucleotide
  source 1..21: mol_type = other DNA
  modified_base 1: mod_base = OTHER; note = 2'-O-Methyl nucleotide
  modified_base 2: mod_base = OTHER; note = 2'-O-Methyl nucleotide
  modified_base 3: mod_base = OTHER; note = 2'-fluoro nucleotide
  modified_base 4: mod_base = OTHER; note = 2'-O-Methyl nucleotide
  modified_base 5: mod_base = OTHER; note = 2'-fluoro nucleotide
  modified_base 6: mod_base = OTHER; note = 2'-O-Methyl nucleotide
  modified_base 7: mod_base = OTHER; note = 2'-fluoro nucleotide
  modified_base 8: mod_base = OTHER; note = 2'-O-Methyl nucleotide
  modified_base 9: mod_base = OTHER; note = 2'-fluoro nucleotide
  modified_base 10: mod_base = OTHER; note = 2'-O-Methyl nucleotide
  modified_base 11: mod_base = OTHER; note = 2'-fluoro nucleotide
  modified_base 12: mod_base = OTHER; note = 2'-O-Methyl nucleotide
  modified_base 13: mod_base = OTHER; note = 2'-fluoro nucleotide
  modified_base 14: mod_base = OTHER; note = 2'-O-Methyl nucleotide
  modified_base 15: mod_base = OTHER; note = 2'-fluoro nucleotide
  modified_base 16: mod_base = OTHER; note = 2'-O-Methyl nucleotide
  modified_base 17: mod_base = OTHER; note = 2'-fluoro nucleotide
  modified_base 18: mod_base = OTHER; note = 2'-O-Methyl nucleotide
  modified_base 19: mod_base = OTHER; note = 2'-fluoro nucleotide
  modified_base 20: mod_base = OTHER; note = deoxy-thymine phosphorothioate
  misc_feature 1..19: note = RNA
  misc_feature 20..21: note = DNA
cgtgaagaagtgtccccgttt

SEQ ID NO: 1729 - DNA, 21 bp, synthetic construct
  misc_feature 1..21: note = Description of Artificial Sequence: Synthetic oligonucleotide
  source 1..21: mol_type = other DNA
  modified_base 1: mod_base = OTHER; note = 2'-fluoro nucleotide
  modified_base 2: mod_base = OTHER; note = 2'-fluoro nucleotide
  modified_base 3: mod_base = OTHER; note = 2'-O-Methyl nucleotide
  modified_base 4: mod_base = OTHER; note = 2'-fluoro nucleotide
  modified_base 5: mod_base = OTHER; note = 2'-O-Methyl nucleotide
  modified_base 6: mod_base = OTHER; note = 2'-fluoro nucleotide
  modified_base 7: mod_base = OTHER; note = 2'-O-Methyl nucleotide
  modified_base 8: mod_base = OTHER; note = 2'-fluoro nucleotide
  modified_base 9: mod_base = OTHER; note = 2'-O-Methyl nucleotide
  modified_base 10: mod_base = OTHER; note = 2'-fluoro nucleotide
  modified_base 11: mod_base = OTHER; note = 2'-O-Methyl nucleotide
  modified_base 12: mod_base = OTHER; note = 2'-fluoro nucleotide
  modified_base 13: mod_base = OTHER; note = 2'-O-Methyl nucleotide
  modified_base 14: mod_base = OTHER; note = 2'-fluoro nucleotide
  modified_base 15: mod_base = OTHER; note = 2'-O-Methyl nucleotide
  modified_base 16: mod_base = OTHER; note = 2'-fluoro nucleotide
  modified_base 17: mod_base = OTHER; note = 2'-O-Methyl nucleotide
  modified_base 18: mod_base = OTHER; note = 2'-fluoro nucleotide
  modified_base 19: mod_base = OTHER; note = 2'-O-Methyl nucleotide
  modified_base 20: mod_base = OTHER; note = deoxy-thymine phosphorothioate
  misc_feature 1..19: note = RNA
  misc_feature 20..21: note = DNA
acggggacacttcttcacgtt

SEQ ID NO: 1730 - DNA, 21 bp, synthetic construct
  misc_feature 1..21: note = Description of Artificial Sequence: Synthetic oligonucleotide
  source 1..21: mol_type = other DNA
  modified_base 1: mod_base = OTHER; note = 2'-O-Methyl nucleotide
  modified_base 2: mod_base = OTHER; note = 2'-O-Methyl nucleotide
  modified_base 3: mod_base = OTHER; note = 2'-fluoro nucleotide
  modified_base 4: mod_base = OTHER; note = 2'-O-Methyl nucleotide
  modified_base 5: mod_base = OTHER; note = 2'-fluoro nucleotide
  modified_base 6: mod_base = OTHER; note = 2'-O-Methyl nucleotide
  modified_base 7: mod_base = OTHER; note = 2'-fluoro nucleotide
  modified_base 8: mod_base = OTHER; note = 2'-O-Methyl nucleotide
  modified_base 9: mod_base = OTHER; note = 2'-fluoro nucleotide
  modified_base 10: mod_base = OTHER; note = 2'-O-Methyl nucleotide
  modified_base 11: mod_base = OTHER; note = 2'-fluoro nucleotide
  modified_base 12: mod_base = OTHER; note = 2'-O-Methyl nucleotide
  modified_base 13: mod_base = OTHER; note = 2'-fluoro nucleotide
  modified_base 14: mod_base = OTHER; note = 2'-O-Methyl nucleotide
  modified_base 15: mod_base = OTHER; note = 2'-fluoro nucleotide
  modified_base 16: mod_base = OTHER; note = 2'-O-Methyl nucleotide
  modified_base 17: mod_base = OTHER; note = 2'-fluoro nucleotide
  modified_base 18: mod_base = OTHER; note = 2'-O-Methyl nucleotide
  modified_base 19: mod_base = OTHER; note = 2'-fluoro nucleotide
  modified_base 20: mod_base = OTHER; note = deoxy-thymine phosphorothioate
  misc_feature 1..19: note = RNA
  misc_feature 20..21: note = DNA
gtgaagaagtgtccccgtatt

SEQ ID NO: 1731 - DNA, 21 bp, synthetic construct
  misc_feature 1..21: note = Description of Artificial Sequence: Synthetic oligonucleotide
  source 1..21: mol_type = other DNA
  modified_base 1: mod_base = OTHER; note = 2'-fluoro nucleotide
  modified_base 2: mod_base = OTHER; note = 2'-fluoro nucleotide
  modified_base 3: mod_base = OTHER; note = 2'-O-Methyl nucleotide
  modified_base 4: mod_base = OTHER; note = 2'-fluoro nucleotide
  modified_base 5: mod_base = OTHER; note = 2'-O-Methyl nucleotide
  modified_base 6: mod_base = OTHER; note = 2'-fluoro nucleotide
  modified_base 7: mod_base = OTHER; note = 2'-O-Methyl nucleotide
  modified_base 8: mod_base = OTHER; note = 2'-fluoro nucleotide
  modified_base 9: mod_base = OTHER; note = 2'-O-Methyl nucleotide
  modified_base 10: mod_base = OTHER; note = 2'-fluoro nucleotide
  modified_base 11: mod_base = OTHER; note = 2'-O-Methyl nucleotide
  modified_base 12: mod_base = OTHER; note = 2'-fluoro nucleotide
  modified_base 13: mod_base = OTHER; note = 2'-O-Methyl nucleotide
  modified_base 14: mod_base = OTHER; note = 2'-fluoro nucleotide
  modified_base 15: mod_base = OTHER; note = 2'-O-Methyl nucleotide
  modified_base 16: mod_base = OTHER; note = 2'-fluoro nucleotide
  modified_base 17: mod_base = OTHER; note = 2'-O-Methyl nucleotide
  modified_base 18: mod_base = OTHER; note = 2'-fluoro nucleotide
  modified_base 19: mod_base = OTHER; note = 2'-O-Methyl nucleotide
  modified_base 20: mod_base = OTHER; note = deoxy-thymine phosphorothioate
  misc_feature 1..19: note = RNA
  misc_feature 20..21: note = DNA
tacggggacacttcttcactt

SEQ ID NO: 1732 - DNA, 21 bp, synthetic construct
  misc_feature 1..21: note = Description of Artificial Sequence: Synthetic oligonucleotide
  source 1..21: mol_type = other DNA
  modified_base 1: mod_base = OTHER; note = 2'-O-Methyl nucleotide
  modified_base 2: mod_base = OTHER; note = 2'-O-Methyl nucleotide
  modified_base 3: mod_base = OTHER; note = 2'-fluoro nucleotide
  modified_base 4: mod_base = OTHER; note = 2'-O-Methyl nucleotide
  modified_base 5: mod_base = OTHER; note = 2'-fluoro nucleotide
  modified_base 6: mod_base = OTHER; note = 2'-O-Methyl nucleotide
  modified_base 7: mod_base = OTHER; note = 2'-fluoro nucleotide
  modified_base 8: mod_base = OTHER; note = 2'-O-Methyl nucleotide
  modified_base 9: mod_base = OTHER; note = 2'-fluoro nucleotide
  modified_base 10: mod_base = OTHER; note = 2'-O-Methyl nucleotide
  modified_base 11: mod_base = OTHER; note = 2'-fluoro nucleotide
  modified_base 12: mod_base = OTHER; note = 2'-O-Methyl nucleotide
  modified_base 13: mod_base = OTHER; note = 2'-fluoro nucleotide
  modified_base 14: mod_base = OTHER; note = 2'-O-Methyl nucleotide
  modified_base 15: mod_base = OTHER; note = 2'-fluoro nucleotide
  modified_base 16: mod_base = OTHER; note = 2'-O-Methyl nucleotide
  modified_base 17: mod_base = OTHER; note = 2'-fluoro nucleotide
  modified_base 18: mod_base = OTHER; note = 2'-O-Methyl nucleotide
  modified_base 19: mod_base = OTHER; note = 2'-fluoro nucleotide
  modified_base 20: mod_base = OTHER; note = deoxy-thymine phosphorothioate
  misc_feature 1..19: note = RNA
  misc_feature 20..21: note = DNA
tgaagaagtgtccccgtaatt

SEQ ID NO: 1733 - DNA, 21 bp, synthetic construct
  misc_feature 1..21: note = Description of Artificial Sequence: Synthetic oligonucleotide
  source 1..21: mol_type = other DNA
  modified_base 1: mod_base = OTHER; note = 2'-fluoro nucleotide
  modified_base 2: mod_base = OTHER; note = 2'-fluoro nucleotide
  modified_base 3: mod_base = OTHER; note = 2'-O-Methyl nucleotide
  modified_base 4: mod_base = OTHER; note = 2'-fluoro nucleotide
  modified_base 5: mod_base = OTHER; note = 2'-O-Methyl nucleotide
  modified_base 6: mod_base = OTHER; note = 2'-fluoro nucleotide
  modified_base 7: mod_base = OTHER; note = 2'-O-Methyl nucleotide
  modified_base 8: mod_base = OTHER; note = 2'-fluoro nucleotide
  modified_base 9: mod_base = OTHER; note = 2'-O-Methyl nucleotide
  modified_base 10: mod_base = OTHER; note = 2'-fluoro nucleotide
  modified_base 11: mod_base = OTHER; note = 2'-O-Methyl nucleotide
  modified_base 12: mod_base = OTHER; note = 2'-fluoro nucleotide
  modified_base 13: mod_base = OTHER; note = 2'-O-Methyl nucleotide
  modified_base 14: mod_base = OTHER; note = 2'-fluoro nucleotide
  modified_base 15: mod_base = OTHER; note = 2'-O-Methyl nucleotide
  modified_base 16: mod_base = OTHER; note = 2'-fluoro nucleotide
  modified_base 17: mod_base = OTHER; note = 2'-O-Methyl nucleotide
  modified_base 18: mod_base = OTHER; note = 2'-fluoro nucleotide
  modified_base 19: mod_base = OTHER; note = 2'-O-Methyl nucleotide
  modified_base 20: mod_base = OTHER; note = deoxy-thymine phosphorothioate
  misc_feature 1..19: note = RNA
  misc_feature 20..21: note = DNA
ttacggggacacttcttcatt

SEQ ID NO: 1734 - DNA, 21 bp, synthetic construct
  misc_feature 1..21: note = Description of Artificial Sequence: Synthetic oligonucleotide
  source 1..21: mol_type = other DNA
  modified_base 1: mod_base = OTHER; note = 2'-O-Methyl nucleotide
  modified_base 2: mod_base = OTHER; note = 2'-O-Methyl nucleotide
  modified_base 3: mod_base = OTHER; note = 2'-fluoro nucleotide
  modified_base 4: mod_base = OTHER; note = 2'-O-Methyl nucleotide
  modified_base 5: mod_base = OTHER; note = 2'-fluoro nucleotide
  modified_base 6: mod_base = OTHER; note = 2'-O-Methyl nucleotide
  modified_base 7: mod_base = OTHER; note = 2'-fluoro nucleotide
  modified_base 8: mod_base = OTHER; note = 2'-O-Methyl nucleotide
  modified_base 9: mod_base = OTHER; note = 2'-fluoro nucleotide
  modified_base 10: mod_base = OTHER; note = 2'-O-Methyl nucleotide
  modified_base 11: mod_base = OTHER; note = 2'-fluoro nucleotide
  modified_base 12: mod_base = OTHER; note = 2'-O-Methyl nucleotide
  modified_base 13: mod_base = OTHER; note = 2'-fluoro nucleotide
  modified_base 14: mod_base = OTHER; note = 2'-O-Methyl nucleotide
  modified_base 15: mod_base = OTHER; note = 2'-fluoro nucleotide
  modified_base 16: mod_base = OTHER; note = 2'-O-Methyl nucleotide
  modified_base 17: mod_base = OTHER; note = 2'-fluoro nucleotide
  modified_base 18: mod_base = OTHER; note = 2'-O-Methyl nucleotide
  modified_base 19: mod_base = OTHER; note = 2'-fluoro nucleotide
  modified_base 20: mod_base = OTHER; note = deoxy-thymine phosphorothioate
  misc_feature 1..19: note = RNA
  misc_feature 20..21: note = DNA
gaagaagtgtccccgtaattt

SEQ ID NO: 1735 - DNA, 21 bp, synthetic construct
  misc_feature 1..21: note = Description of Artificial Sequence: Synthetic oligonucleotide
  source 1..21: mol_type = other DNA
  modified_base 1: mod_base = OTHER; note = 2'-fluoro nucleotide
  modified_base 2: mod_base = OTHER; note = 2'-fluoro nucleotide
  modified_base 3: mod_base = OTHER; note = 2'-O-Methyl nucleotide
  modified_base 4: mod_base = OTHER; note = 2'-fluoro nucleotide
  modified_base 5: mod_base = OTHER; note = 2'-O-Methyl nucleotide
  modified_base 6: mod_base = OTHER; note = 2'-fluoro nucleotide
  modified_base 7: mod_base = OTHER; note = 2'-O-Methyl nucleotide
  modified_base 8: mod_base = OTHER; note = 2'-fluoro nucleotide
  modified_base 9: mod_base = OTHER; note = 2'-O-Methyl nucleotide
  modified_base 10: mod_base = OTHER; note = 2'-fluoro nucleotide
  modified_base 11: mod_base = OTHER; note = 2'-O-Methyl nucleotide
  modified_base 12: mod_base = OTHER; note = 2'-fluoro nucleotide
  modified_base 13: mod_base = OTHER; note = 2'-O-Methyl nucleotide
  modified_base 14: mod_base = OTHER; note = 2'-fluoro nucleotide
  modified_base 15: mod_base = OTHER; note = 2'-O-Methyl nucleotide
  modified_base 16: mod_base = OTHER; note = 2'-fluoro nucleotide
  modified_base 17: mod_base = OTHER; note = 2'-O-Methyl nucleotide
  modified_base 18: mod_base = OTHER; note = 2'-fluoro nucleotide
  modified_base 19: mod_base = OTHER; note = 2'-O-Methyl nucleotide
  modified_base 20: mod_base = OTHER; note = deoxy-thymine phosphorothioate
  misc_feature 1..19: note = RNA
  misc_feature 20..21: note = DNA
attacggggacacttcttctt

SEQ ID NO: 1736 - DNA, 21 bp, synthetic construct
  misc_feature 1..21: note = Description of Artificial Sequence: Synthetic oligonucleotide
  source 1..21: mol_type = other DNA
  modified_base 1: mod_base = OTHER; note = 2'-O-Methyl nucleotide
  modified_base 2: mod_base = OTHER; note = 2'-O-Methyl nucleotide
  modified_base 3: mod_base = OTHER; note = 2'-fluoro nucleotide
  modified_base 4: mod_base = OTHER; note = 2'-O-Methyl nucleotide
  modified_base 5: mod_base = OTHER; note = 2'-fluoro nucleotide
  modified_base 6: mod_base = OTHER; note = 2'-O-Methyl nucleotide
  modified_base 7: mod_base = OTHER; note = 2'-fluoro nucleotide
  modified_base 8: mod_base = OTHER; note = 2'-O-Methyl nucleotide
  modified_base 9: mod_base = OTHER; note = 2'-fluoro nucleotide
  modified_base 10: mod_base = OTHER; note = 2'-O-Methyl nucleotide
  modified_base 11: mod_base = OTHER; note = 2'-fluoro nucleotide
  modified_base 12: mod_base = OTHER; note = 2'-O-Methyl nucleotide
  modified_base 13: mod_base = OTHER; note = 2'-fluoro nucleotide
  modified_base 14: mod_base = OTHER; note = 2'-O-Methyl nucleotide
  modified_base 15: mod_base = OTHER; note = 2'-fluoro nucleotide
  modified_base 16: mod_base = OTHER; note = 2'-O-Methyl nucleotide
  modified_base 17: mod_base = OTHER; note = 2'-fluoro nucleotide
  modified_base 18: mod_base = OTHER; note = 2'-O-Methyl nucleotide
  modified_base 19: mod_base = OTHER; note = 2'-fluoro nucleotide
  modified_base 20: mod_base = OTHER; note = deoxy-thymine phosphorothioate
  misc_feature 1..19: note = RNA
  misc_feature 20..21: note = DNA
aagaagtgtccccgtaatttt

SEQ ID NO: 1737 - DNA, 21 bp, synthetic construct
  misc_feature 1..21: note = Description of Artificial Sequence: Synthetic oligonucleotide
  source 1..21: mol_type = other DNA
  modified_base 1: mod_base = OTHER; note = 2'-fluoro nucleotide
  modified_base 2: mod_base = OTHER; note = 2'-fluoro nucleotide
  modified_base 3: mod_base = OTHER; note = 2'-O-Methyl nucleotide
  modified_base 4: mod_base = OTHER; note = 2'-fluoro nucleotide
  modified_base 5: mod_base = OTHER; note = 2'-O-Methyl nucleotide
  modified_base 6: mod_base = OTHER; note = 2'-fluoro nucleotide
  modified_base 7: mod_base = OTHER; note = 2'-O-Methyl nucleotide
  modified_base 8: mod_base = OTHER; note = 2'-fluoro nucleotide
  modified_base 9: mod_base = OTHER; note = 2'-O-Methyl nucleotide
  modified_base 10: mod_base = OTHER; note = 2'-fluoro nucleotide
  modified_base 11: mod_base = OTHER; note = 2'-O-Methyl nucleotide
  modified_base 12: mod_base = OTHER; note = 2'-fluoro nucleotide
  modified_base 13: mod_base = OTHER; note = 2'-O-Methyl nucleotide
  modified_base 14: mod_base = OTHER; note = 2'-fluoro nucleotide
  modified_base 15: mod_base = OTHER; note = 2'-O-Methyl nucleotide
  modified_base 16: mod_base = OTHER; note = 2'-fluoro nucleotide
  modified_base 17: mod_base = OTHER; note = 2'-O-Methyl nucleotide
  modified_base 18: mod_base = OTHER; note = 2'-fluoro nucleotide
  modified_base 19: mod_base = OTHER; note = 2'-O-Methyl nucleotide
  modified_base 20: mod_base = OTHER; note = deoxy-thymine phosphorothioate
  misc_feature 1..19: note = RNA
  misc_feature 20..21: note = DNA
aattacggggacacttctttt

SEQ ID NO: 1738 - DNA, 21 bp, synthetic construct
  misc_feature 1..21: note = Description of Artificial Sequence: Synthetic oligonucleotide
  source 1..21: mol_type = other DNA
  modified_base 1: mod_base = OTHER; note = 2'-O-Methyl nucleotide
  modified_base 2: mod_base = OTHER; note = 2'-O-Methyl nucleotide
  modified_base 3: mod_base = OTHER; note = 2'-fluoro nucleotide
  modified_base 4: mod_base = OTHER; note = 2'-O-Methyl nucleotide
  modified_base 5: mod_base = OTHER; note = 2'-fluoro nucleotide
  modified_base 6: mod_base = OTHER; note = 2'-O-Methyl nucleotide
  modified_base 7: mod_base = OTHER; note = 2'-fluoro nucleotide
  modified_base 8: mod_base = OTHER; note = 2'-O-Methyl nucleotide
  modified_base 9: mod_base = OTHER; note = 2'-fluoro nucleotide
  modified_base 10: mod_base = OTHER; note = 2'-O-Methyl nucleotide
  modified_base 11: mod_base = OTHER; note = 2'-fluoro nucleotide
  modified_base 12: mod_base = OTHER; note = 2'-O-Methyl nucleotide
  modified_base 13: mod_base = OTHER; note = 2'-fluoro nucleotide
  modified_base 14: mod_base = OTHER; note = 2'-O-Methyl nucleotide
  modified_base 15: mod_base = OTHER; note = 2'-fluoro nucleotide
  modified_base 16: mod_base = OTHER; note = 2'-O-Methyl nucleotide
  modified_base 17: mod_base = OTHER; note = 2'-fluoro nucleotide
  modified_base 18: mod_base = OTHER; note = 2'-O-Methyl nucleotide
  modified_base 19: mod_base = OTHER; note = 2'-fluoro nucleotide
  modified_base 20: mod_base = OTHER; note = deoxy-thymine phosphorothioate
  misc_feature 1..19: note = RNA
  misc_feature 20..21: note = DNA
agaagtgtccccgtaattatt

SEQ ID NO: 1739 - DNA, 21 bp, synthetic construct
  misc_feature 1..21: note = Description of Artificial Sequence: Synthetic oligonucleotide
  source 1..21: mol_type = other DNA
  modified_base 1: mod_base = OTHER; note = 2'-fluoro nucleotide
  modified_base 2: mod_base = OTHER; note = 2'-fluoro nucleotide
  modified_base 3: mod_base = OTHER; note = 2'-O-Methyl nucleotide
  modified_base 4: mod_base = OTHER; note = 2'-fluoro nucleotide
  modified_base 5: mod_base = OTHER; note = 2'-O-Methyl nucleotide
  modified_base 6: mod_base = OTHER; note = 2'-fluoro nucleotide
  modified_base 7: mod_base = OTHER; note = 2'-O-Methyl nucleotide
  modified_base 8: mod_base = OTHER; note = 2'-fluoro nucleotide
  modified_base 9: mod_base = OTHER; note = 2'-O-Methyl nucleotide
  modified_base 10: mod_base = OTHER; note = 2'-fluoro nucleotide
  modified_base 11: mod_base = OTHER; note = 2'-O-Methyl nucleotide
  modified_base 12: mod_base = OTHER; note = 2'-fluoro nucleotide
  modified_base 13: mod_base = OTHER; note = 2'-O-Methyl nucleotide
  modified_base 14: mod_base = OTHER; note = 2'-fluoro nucleotide
  modified_base 15: mod_base = OTHER; note = 2'-O-Methyl nucleotide
  modified_base 16: mod_base = OTHER; note = 2'-fluoro nucleotide
  modified_base 17: mod_base = OTHER; note = 2'-O-Methyl nucleotide
  modified_base 18: mod_base = OTHER; note = 2'-fluoro nucleotide
  modified_base 19: mod_base = OTHER; note = 2'-O-Methyl nucleotide
  modified_base 20: mod_base = OTHER; note = deoxy-thymine phosphorothioate
  misc_feature 1..19: note = RNA
  misc_feature 20..21: note = DNA
taattacggggacacttcttt

SEQ ID NO: 1740 - DNA, 21 bp, synthetic construct
  misc_feature 1..21: note = Description of Artificial Sequence: Synthetic oligonucleotide
  source 1..21: mol_type = other DNA
  modified_base 1: mod_base = OTHER; note = 2'-O-Methyl nucleotide
  modified_base 2: mod_base = OTHER; note = 2'-O-Methyl nucleotide
  modified_base 3: mod_base = OTHER; note = 2'-fluoro nucleotide
  modified_base 4: mod_base = OTHER; note = 2'-O-Methyl nucleotide
  modified_base 5: mod_base = OTHER; note = 2'-fluoro nucleotide
  modified_base 6: mod_base = OTHER; note = 2'-O-Methyl nucleotide
  modified_base 7: mod_base = OTHER; note = 2'-fluoro nucleotide
  modified_base 8: mod_base = OTHER; note = 2'-O-Methyl nucleotide
  modified_base 9: mod_base = OTHER; note = 2'-fluoro nucleotide
  modified_base 10: mod_base = OTHER; note = 2'-O-Methyl nucleotide
  modified_base 11: mod_base = OTHER; note = 2'-fluoro nucleotide
  modified_base 12: mod_base = OTHER; note = 2'-O-Methyl nucleotide
  modified_base 13: mod_base = OTHER; note = 2'-fluoro nucleotide
  modified_base 14: mod_base = OTHER; note = 2'-O-Methyl nucleotide
  modified_base 15: mod_base = OTHER; note = 2'-fluoro nucleotide
  modified_base 16: mod_base = OTHER; note = 2'-O-Methyl nucleotide
  modified_base 17: mod_base = OTHER; note = 2'-fluoro nucleotide
  modified_base 18: mod_base = OTHER; note = 2'-O-Methyl nucleotide
  modified_base 19: mod_base = OTHER; note = 2'-fluoro nucleotide
  modified_base 20: mod_base = OTHER; note = deoxy-thymine phosphorothioate
  misc_feature 1..19: note = RNA
  misc_feature 20..21: note = DNA
gaagtgtccccgtaattattt

SEQ ID NO: 1741 - DNA, 21 bp, synthetic construct
  misc_feature 1..21: note = Description of Artificial Sequence: Synthetic oligonucleotide
  source 1..21: mol_type = other DNA
  modified_base 1: mod_base = OTHER; note = 2'-fluoro nucleotide
  modified_base 2: mod_base = OTHER; note = 2'-fluoro nucleotide
  modified_base 3: mod_base = OTHER; note = 2'-O-Methyl nucleotide
  modified_base 4: mod_base = OTHER; note = 2'-fluoro nucleotide
  modified_base 5: mod_base = OTHER; note = 2'-O-Methyl nucleotide
  modified_base 6: mod_base = OTHER; note = 2'-fluoro nucleotide
  modified_base 7: mod_base = OTHER; note = 2'-O-Methyl nucleotide
  modified_base 8: mod_base = OTHER; note = 2'-fluoro nucleotide
  modified_base 9: mod_base = OTHER; note = 2'-O-Methyl nucleotide
  modified_base 10: mod_base = OTHER; note = 2'-fluoro nucleotide
  modified_base 11: mod_base = OTHER; note = 2'-O-Methyl nucleotide
  modified_base 12: mod_base = OTHER; note = 2'-fluoro nucleotide
  modified_base 13: mod_base = OTHER; note = 2'-O-Methyl nucleotide
  modified_base 14: mod_base = OTHER; note = 2'-fluoro nucleotide
  modified_base 15: mod_base = OTHER; note = 2'-O-Methyl nucleotide
  modified_base 16: mod_base = OTHER; note = 2'-fluoro nucleotide
  modified_base 17: mod_base = OTHER; note = 2'-O-Methyl nucleotide
  modified_base 18: mod_base = OTHER; note = 2'-fluoro nucleotide
  modified_base 19: mod_base = OTHER; note = 2'-O-Methyl nucleotide
  modified_base 20: mod_base = OTHER; note = deoxy-thymine phosphorothioate
  misc_feature 1..19: note = RNA
  misc_feature 20..21: note = DNA
ataattacggggacacttctt

SEQ ID NO: 1742 - DNA, 21 bp, synthetic construct
  misc_feature 1..21: note = Description of Artificial Sequence: Synthetic oligonucleotide
  source 1..21: mol_type = other DNA
  modified_base 1: mod_base = OTHER; note = 2'-O-Methyl nucleotide
  modified_base 2: mod_base = OTHER; note = 2'-O-Methyl nucleotide
  modified_base 3: mod_base = OTHER; note = 2'-fluoro nucleotide
  modified_base 4: mod_base = OTHER; note = 2'-O-Methyl nucleotide
  modified_base 5: mod_base = OTHER; note = 2'-fluoro nucleotide
  modified_base 6: mod_base = OTHER; note = 2'-O-Methyl nucleotide
  modified_base 7: mod_base = OTHER; note = 2'-fluoro nucleotide
  modified_base 8: mod_base = OTHER; note = 2'-O-Methyl nucleotide
  modified_base 9: mod_base = OTHER; note = 2'-fluoro nucleotide
  modified_base 10: mod_base = OTHER; note = 2'-O-Methyl nucleotide
  modified_base 11: mod_base = OTHER; note = 2'-fluoro nucleotide
  modified_base 12: mod_base = OTHER; note = 2'-O-Methyl nucleotide
  modified_base 13: mod_base = OTHER; note = 2'-fluoro nucleotide
  modified_base 14: mod_base = OTHER; note = 2'-O-Methyl nucleotide
  modified_base 15: mod_base = OTHER; note = 2'-fluoro nucleotide
  modified_base 16: mod_base = OTHER; note = 2'-O-Methyl nucleotide
  modified_base 17: mod_base = OTHER; note = 2'-fluoro nucleotide
  modified_base 18: mod_base = OTHER; note = 2'-O-Methyl nucleotide
  modified_base 19: mod_base = OTHER; note = 2'-fluoro nucleotide
  modified_base 20: mod_base = OTHER; note = deoxy-thymine phosphorothioate
  misc_feature 1..19: note = RNA
  misc_feature 20..21: note = DNA
aagtgtccccgtaattatgtt

SEQ ID NO: 1743 - DNA, 21 bp, synthetic construct
  misc_feature 1..21: note = Description of Artificial Sequence: Synthetic oligonucleotide
  source 1..21: mol_type = other DNA
  modified_base 1: mod_base = OTHER; note = 2'-fluoro nucleotide
  modified_base 2: mod_base = OTHER; note = 2'-fluoro nucleotide
  modified_base 3: mod_base = OTHER; note = 2'-O-Methyl nucleotide
  modified_base 4: mod_base = OTHER; note = 2'-fluoro nucleotide
  modified_base 5: mod_base = OTHER; note = 2'-O-Methyl nucleotide
  modified_base 6: mod_base = OTHER; note = 2'-fluoro nucleotide
  modified_base 7: mod_base = OTHER; note = 2'-O-Methyl nucleotide
  modified_base 8: mod_base = OTHER; note = 2'-fluoro nucleotide
  modified_base 9: mod_base = OTHER; note = 2'-O-Methyl nucleotide
  modified_base 10: mod_base = OTHER; note = 2'-fluoro nucleotide
  modified_base 11: mod_base = OTHER; note = 2'-O-Methyl nucleotide
  modified_base 12: mod_base = OTHER; note = 2'-fluoro nucleotide
  modified_base 13: mod_base = OTHER; note = 2'-O-Methyl nucleotide
  modified_base 14: mod_base = OTHER; note = 2'-fluoro nucleotide
  modified_base 15: mod_base = OTHER; note = 2'-O-Methyl nucleotide
  modified_base 16: mod_base = OTHER; note = 2'-fluoro nucleotide
  modified_base 17: mod_base = OTHER; note = 2'-O-Methyl nucleotide
  modified_base 18: mod_base = OTHER; note = 2'-fluoro nucleotide
  modified_base 19: mod_base = OTHER; note = 2'-O-Methyl nucleotide
  modified_base 20: mod_base = OTHER; note = deoxy-thymine phosphorothioate
  misc_feature 1..19: note = RNA
  misc_feature 20..21: note = DNA
cataattacggggacactttt

SEQ ID NO: 1744 - DNA, 21 bp, synthetic construct
  misc_feature 1..21: note = Description of Artificial Sequence: Synthetic oligonucleotide
  source 1..21: mol_type = other DNA
  modified_base 1: mod_base = OTHER; note = 2'-O-Methyl nucleotide
  modified_base 2: mod_base = OTHER; note = 2'-O-Methyl nucleotide
  modified_base 3: mod_base = OTHER; note = 2'-fluoro nucleotide
  modified_base 4: mod_base = OTHER; note = 2'-O-Methyl nucleotide
  modified_base 5: mod_base = OTHER; note = 2'-fluoro nucleotide
  modified_base 6: mod_base = OTHER; note = 2'-O-Methyl nucleotide
  modified_base 7: mod_base = OTHER; note = 2'-fluoro nucleotide
  modified_base 8: mod_base = OTHER; note = 2'-O-Methyl nucleotide
  modified_base 9: mod_base = OTHER; note = 2'-fluoro nucleotide
  modified_base 10: mod_base = OTHER; note = 2'-O-Methyl nucleotide
  modified_base 11: mod_base = OTHER; note = 2'-fluoro nucleotide
  modified_base 12: mod_base = OTHER; note = 2'-O-Methyl nucleotide
  modified_base 13: mod_base = OTHER; note = 2'-fluoro nucleotide
  modified_base 14: mod_base = OTHER; note = 2'-O-Methyl nucleotide
  modified_base 15: mod_base = OTHER; note = 2'-fluoro nucleotide
  modified_base 16: mod_base = OTHER; note = 2'-O-Methyl nucleotide
  modified_base 17: mod_base = OTHER; note = 2'-fluoro nucleotide
  modified_base 18: mod_base = OTHER; note = 2'-O-Methyl nucleotide
  modified_base 19: mod_base = OTHER; note = 2'-fluoro nucleotide
  modified_base 20: mod_base = OTHER; note = deoxy-thymine phosphorothioate
  misc_feature 1..19: note = RNA
  misc_feature 20..21: note = DNA
agtgtccccgtaattatgttt

SEQ ID NO: 1745 - DNA, 21 bp, synthetic construct
  misc_feature 1..21: note = Description of Artificial Sequence: Synthetic oligonucleotide
  source 1..21: mol_type = other DNA
  modified_base 1: mod_base = OTHER; note = 2'-fluoro nucleotide
  modified_base 2: mod_base = OTHER; note = 2'-fluoro nucleotide
  modified_base 3: mod_base = OTHER; note = 2'-O-Methyl nucleotide
  modified_base 4: mod_base = OTHER; note = 2'-fluoro nucleotide
  modified_base 5: mod_base = OTHER; note = 2'-O-Methyl nucleotide
  modified_base 6: mod_base = OTHER; note = 2'-fluoro nucleotide
  modified_base 7: mod_base = OTHER; note = 2'-O-Methyl nucleotide
  modified_base 8: mod_base = OTHER; note = 2'-fluoro nucleotide
  modified_base 9: mod_base = OTHER; note = 2'-O-Methyl nucleotide
  modified_base 10: mod_base = OTHER; note = 2'-fluoro nucleotide
  modified_base 11: mod_base = OTHER; note = 2'-O-Methyl nucleotide
  modified_base 12: mod_base = OTHER; note = 2'-fluoro nucleotide
  modified_base 13: mod_base = OTHER; note = 2'-O-Methyl nucleotide
  modified_base 14: mod_base = OTHER; note = 2'-fluoro nucleotide
  modified_base 15: mod_base = OTHER; note = 2'-O-Methyl nucleotide
  modified_base 16: mod_base = OTHER; note = 2'-fluoro nucleotide
  modified_base 17: mod_base = OTHER; note = 2'-O-Methyl nucleotide
  modified_base 18: mod_base = OTHER; note = 2'-fluoro nucleotide
  modified_base 19: mod_base = OTHER; note = 2'-O-Methyl nucleotide
  modified_base 20: mod_base = OTHER; note = deoxy-thymine phosphorothioate
  misc_feature 1..19: note = RNA
  misc_feature 20..21: note = DNA
acataattacggggacacttt

SEQ ID NO: 1746 - DNA, 21 bp, synthetic construct
  misc_feature 1..21: note = Description of Artificial Sequence: Synthetic oligonucleotide
  source 1..21: mol_type = other DNA
  modified_base 1: mod_base = OTHER; note = 2'-O-Methyl nucleotide
  modified_base 2: mod_base = OTHER; note = 2'-O-Methyl nucleotide
  modified_base 3: mod_base = OTHER; note = 2'-fluoro nucleotide
  modified_base 4: mod_base = OTHER; note = 2'-O-Methyl nucleotide
  modified_base 5: mod_base = OTHER; note = 2'-fluoro nucleotide
  modified_base 6: mod_base = OTHER; note = 2'-O-Methyl nucleotide
  modified_base 7: mod_base = OTHER; note = 2'-fluoro nucleotide
  modified_base 8: mod_base = OTHER; note = 2'-O-Methyl nucleotide
  modified_base 9: mod_base = OTHER; note = 2'-fluoro nucleotide
  modified_base 10: mod_base = OTHER; note = 2'-O-Methyl nucleotide
  modified_base 11: mod_base = OTHER; note = 2'-fluoro nucleotide
  modified_base 12: mod_base = OTHER; note = 2'-O-Methyl nucleotide
  modified_base 13: mod_base = OTHER; note = 2'-fluoro nucleotide
  modified_base 14: mod_base = OTHER; note = 2'-O-Methyl nucleotide
  modified_base 15: mod_base = OTHER; note = 2'-fluoro nucleotide
  modified_base 16: mod_base = OTHER; note = 2'-O-Methyl nucleotide
  modified_base 17: mod_base = OTHER; note = 2'-fluoro nucleotide
  modified_base 18: mod_base = OTHER; note = 2'-O-Methyl nucleotide
  modified_base 19: mod_base = OTHER; note = 2'-fluoro nucleotide
  modified_base 20: mod_base = OTHER; note = deoxy-thymine phosphorothioate
  misc_feature 1..19: note = RNA
  misc_feature 20..21: note = DNA
gtgtccccgtaattatgtgtt

SEQ ID NO: 1747 - DNA, 21 bp, synthetic construct
  misc_feature 1..21: note = Description of Artificial Sequence: Synthetic oligonucleotide
  source 1..21: mol_type = other DNA
  modified_base 1: mod_base = OTHER; note = 2'-fluoro nucleotide
  modified_base 2: mod_base = OTHER; note = 2'-fluoro nucleotide
  modified_base 3: mod_base = OTHER; note = 2'-O-Methyl nucleotide
  modified_base 4: mod_base = OTHER; note = 2'-fluoro nucleotide
  modified_base 5: mod_base = OTHER; note = 2'-O-Methyl nucleotide
  modified_base 6: mod_base = OTHER; note = 2'-fluoro nucleotide
  modified_base 7: mod_base = OTHER; note = 2'-O-Methyl nucleotide
  modified_base 8: mod_base = OTHER; note = 2'-fluoro nucleotide
  modified_base 9: mod_base = OTHER; note = 2'-O-Methyl nucleotide
  modified_base 10: mod_base = OTHER; note = 2'-fluoro nucleotide
  modified_base 11: mod_base = OTHER; note = 2'-O-Methyl nucleotide
  modified_base 12: mod_base = OTHER; note = 2'-fluoro nucleotide
  modified_base 13: mod_base = OTHER; note = 2'-O-Methyl nucleotide
  modified_base 14: mod_base = OTHER; note = 2'-fluoro nucleotide
  modified_base 15: mod_base = OTHER; note = 2'-O-Methyl nucleotide
  modified_base 16: mod_base = OTHER; note = 2'-fluoro nucleotide
  modified_base 17: mod_base = OTHER; note = 2'-O-Methyl nucleotide
  modified_base 18: mod_base = OTHER; note = 2'-fluoro nucleotide
  modified_base 19: mod_base = OTHER; note = 2'-O-Methyl nucleotide
  modified_base 20: mod_base = OTHER; note = deoxy-thymine phosphorothioate
  misc_feature 1..19: note = RNA
  misc_feature 20..21: note = DNA
cacataattacggggacactt

SEQ ID NO: 1748 - DNA, 21 bp, synthetic construct
  misc_feature 1..21: note = Description of Artificial Sequence: Synthetic oligonucleotide
  source 1..21: mol_type = other DNA
  modified_base 1: mod_base = OTHER; note = 2'-O-Methyl nucleotide
  modified_base 2: mod_base = OTHER; note = 2'-O-Methyl nucleotide
  modified_base 3: mod_base = OTHER; note = 2'-fluoro nucleotide
  modified_base 4: mod_base = OTHER; note = 2'-O-Methyl nucleotide
  modified_base 5: mod_base = OTHER; note = 2'-fluoro nucleotide
  modified_base 6: mod_base = OTHER; note = 2'-O-Methyl nucleotide
  modified_base 7: mod_base = OTHER; note = 2'-fluoro nucleotide
  modified_base 8: mod_base = OTHER; note = 2'-O-Methyl nucleotide
  modified_base 9: mod_base = OTHER; note = 2'-fluoro nucleotide
  modified_base 10: mod_base = OTHER; note = 2'-O-Methyl nucleotide
  modified_base 11: mod_base = OTHER; note = 2'-fluoro nucleotide
  modified_base 12: mod_base = OTHER; note = 2'-O-Methyl nucleotide
  modified_base 13: mod_base = OTHER; note = 2'-fluoro nucleotide
  modified_base 14: mod_base = OTHER; note = 2'-O-Methyl nucleotide
  modified_base 15: mod_base = OTHER; note = 2'-fluoro nucleotide
  modified_base 16: mod_base = OTHER; note = 2'-O-Methyl nucleotide
  modified_base 17: mod_base = OTHER; note = 2'-fluoro nucleotide
  modified_base 18: mod_base = OTHER; note = 2'-O-Methyl nucleotide
  modified_base 19: mod_base = OTHER; note = 2'-fluoro nucleotide
  modified_base 20: mod_base = OTHER; note = deoxy-thymine phosphorothioate
  misc_feature 1..19: note = RNA
  misc_feature 20..21: note = DNA
tgtccccgtaattatgtggtt

SEQ ID NO: 1749 - DNA, 21 bp, synthetic construct
  misc_feature 1..21: note = Description of Artificial Sequence: Synthetic oligonucleotide
  source 1..21: mol_type = other DNA
  modified_base 1: mod_base = OTHER; note = 2'-fluoro nucleotide
  modified_base 2: mod_base = OTHER; note = 2'-fluoro nucleotide
  modified_base 3: mod_base = OTHER; note = 2'-O-Methyl nucleotide
  modified_base 4: mod_base = OTHER; note = 2'-fluoro nucleotide
  modified_base 5: mod_base = OTHER; note = 2'-O-Methyl nucleotide
  modified_base 6: mod_base = OTHER; note = 2'-fluoro nucleotide
  modified_base 7: mod_base = OTHER; note = 2'-O-Methyl nucleotide
  modified_base 8: mod_base = OTHER; note = 2'-fluoro nucleotide
  modified_base 9: mod_base = OTHER; note = 2'-O-Methyl nucleotide
  modified_base 10: mod_base = OTHER; note = 2'-fluoro nucleotide
  modified_base 11: mod_base = OTHER; note = 2'-O-Methyl nucleotide
  modified_base 12: mod_base = OTHER; note = 2'-fluoro nucleotide
  modified_base 13: mod_base = OTHER; note = 2'-O-Methyl nucleotide
  modified_base 14: mod_base = OTHER; note = 2'-fluoro nucleotide
  modified_base 15: mod_base = OTHER; note = 2'-O-Methyl nucleotide
  modified_base 16: mod_base = OTHER; note = 2'-fluoro nucleotide
  modified_base 17: mod_base = OTHER; note = 2'-O-Methyl nucleotide
  modified_base 18: mod_base = OTHER; note = 2'-fluoro nucleotide
  modified_base 19: mod_base = OTHER; note = 2'-O-Methyl nucleotide
  modified_base 20: mod_base = OTHER; note = deoxy-thymine phosphorothioate
  misc_feature 1..19: note = RNA
  misc_feature 20..21: note = DNA
ccacataattacggggacatt

SEQ ID NO: 1750 - DNA, 21 bp, synthetic construct
  misc_feature 1..21: note = Description of Artificial Sequence: Synthetic oligonucleotide
  source 1..21: mol_type = other DNA
  modified_base 1: mod_base = OTHER; note = 2'-O-Methyl nucleotide
  modified_base 2: mod_base = OTHER; note = 2'-O-Methyl nucleotide
  modified_base 3: mod_base = OTHER; note = 2'-fluoro nucleotide
  modified_base 4: mod_base = OTHER; note = 2'-O-Methyl nucleotide
  modified_base 5: mod_base = OTHER; note = 2'-fluoro nucleotide
  modified_base 6: mod_base = OTHER; note = 2'-O-Methyl nucleotide
  modified_base 7: mod_base = OTHER; note = 2'-fluoro nucleotide
  modified_base 8: mod_base = OTHER; note = 2'-O-Methyl nucleotide
  modified_base 9: mod_base = OTHER; note = 2'-fluoro nucleotide
  modified_base 10: mod_base = OTHER; note = 2'-O-Methyl nucleotide
  modified_base 11: mod_base = OTHER; note = 2'-fluoro nucleotide
  modified_base 12: mod_base = OTHER; note = 2'-O-Methyl nucleotide
  modified_base 13: mod_base = OTHER; note = 2'-fluoro nucleotide
  modified_base 14: mod_base = OTHER; note = 2'-O-Methyl nucleotide
  modified_base 15: mod_base = OTHER; note = 2'-fluoro nucleotide
  modified_base 16: mod_base = OTHER; note = 2'-O-Methyl nucleotide
  modified_base 17: mod_base = OTHER; note = 2'-fluoro nucleotide
  modified_base 18: mod_base = OTHER; note = 2'-O-Methyl nucleotide
  modified_base 19: mod_base = OTHER; note = 2'-fluoro nucleotide
  modified_base 20: mod_base = OTHER; note = deoxy-thymine phosphorothioate
  misc_feature 1..19: note = RNA
  misc_feature 20..21: note = DNA
gtccccgtaattatgtggttt

SEQ ID NO: 1751 - DNA, 21 bp, synthetic construct
  misc_feature 1..21: note = Description of Artificial Sequence: Synthetic oligonucleotide
  source 1..21: mol_type = other DNA
  modified_base 1: mod_base = OTHER; note = 2'-fluoro nucleotide
  modified_base 2: mod_base = OTHER; note = 2'-fluoro nucleotide
  modified_base 3: mod_base = OTHER; note = 2'-O-Methyl nucleotide
  modified_base 4: mod_base = OTHER; note = 2'-fluoro nucleotide
  modified_base 5: mod_base = OTHER; note = 2'-O-Methyl nucleotide
  modified_base 6: mod_base = OTHER; note = 2'-fluoro nucleotide
  modified_base 7: mod_base = OTHER; note = 2'-O-Methyl nucleotide
  modified_base 8: mod_base = OTHER; note = 2'-fluoro nucleotide
  modified_base 9: mod_base = OTHER; note = 2'-O-Methyl nucleotide
  modified_base 10: mod_base = OTHER; note = 2'-fluoro nucleotide
  modified_base 11: mod_base = OTHER; note = 2'-O-Methyl nucleotide
  modified_base 12: mod_base = OTHER; note = 2'-fluoro nucleotide
  modified_base 13: mod_base = OTHER; note = 2'-O-Methyl nucleotide
  modified_base 14: mod_base = OTHER; note = 2'-fluoro nucleotide
  modified_base 15: mod_base = OTHER; note = 2'-O-Methyl nucleotide
  modified_base 16: mod_base = OTHER; note = 2'-fluoro nucleotide
  modified_base 17: mod_base = OTHER; note = 2'-O-Methyl nucleotide
  modified_base 18: mod_base = OTHER; note = 2'-fluoro nucleotide
  modified_base 19: mod_base = OTHER; note = 2'-O-Methyl nucleotide
  modified_base 20: mod_base = OTHER; note = deoxy-thymine phosphorothioate
  misc_feature 1..19: note = RNA
  misc_feature 20..21: note = DNA
accacataattacggggactt

SEQ ID NO: 1752 - DNA, 21 bp, synthetic construct
  misc_feature 1..21: note = Description of Artificial Sequence: Synthetic oligonucleotide
  source 1..21: mol_type = other DNA
  modified_base 1: mod_base = OTHER; note = 2'-O-Methyl nucleotide
  modified_base 2: mod_base = OTHER; note = 2'-O-Methyl nucleotide
  modified_base 3: mod_base = OTHER; note = 2'-fluoro nucleotide
  modified_base 4: mod_base = OTHER; note = 2'-O-Methyl nucleotide
  modified_base 5: mod_base = OTHER; note = 2'-fluoro nucleotide
  modified_base 6: mod_base = OTHER; note = 2'-O-Methyl nucleotide
  modified_base 7: mod_base = OTHER; note = 2'-fluoro nucleotide
  modified_base 8: mod_base = OTHER; note = 2'-O-Methyl nucleotide
  modified_base 9: mod_base = OTHER; note = 2'-fluoro nucleotide
  modified_base 10: mod_base = OTHER; note = 2'-O-Methyl nucleotide
  modified_base 11: mod_base = OTHER; note = 2'-fluoro nucleotide
  modified_base 12: mod_base = OTHER; note = 2'-O-Methyl nucleotide
  modified_base 13: mod_base = OTHER; note = 2'-fluoro nucleotide
  modified_base 14: mod_base = OTHER; note = 2'-O-Methyl nucleotide
  modified_base 15: mod_base = OTHER; note = 2'-fluoro nucleotide
  modified_base 16: mod_base = OTHER; note = 2'-O-Methyl nucleotide
  modified_base 17: mod_base = OTHER; note = 2'-fluoro nucleotide
  modified_base 18: mod_base = OTHER; note = 2'-O-Methyl nucleotide
  modified_base 19: mod_base = OTHER; note = 2'-fluoro nucleotide
  modified_base 20: mod_base = OTHER; note = deoxy-thymine phosphorothioate
  misc_feature 1..19: note = RNA
  misc_feature 20..21: note = DNA
ccccgtaattatgtggtgatt

SEQ ID NO: 1753 - DNA, 21 bp, synthetic construct
  misc_feature 1..21: note = Description of Artificial Sequence: Synthetic oligonucleotide
  source 1..21: mol_type = other DNA
  modified_base 1: mod_base = OTHER; note = 2'-fluoro nucleotide
  modified_base 2: mod_base = OTHER; note = 2'-fluoro nucleotide
  modified_base 3: mod_base = OTHER; note = 2'-O-Methyl nucleotide
  modified_base 4: mod_base = OTHER; note = 2'-fluoro nucleotide
  modified_base 5: mod_base = OTHER; note = 2'-O-Methyl nucleotide
  modified_base 6: mod_base = OTHER; note = 2'-fluoro nucleotide
  modified_base 7: mod_base = OTHER; note = 2'-O-Methyl nucleotide
  modified_base 8: mod_base = OTHER; note = 2'-fluoro nucleotide
  modified_base 9: mod_base = OTHER; note = 2'-O-Methyl nucleotide
  modified_base 10: mod_base = OTHER; note = 2'-fluoro nucleotide
  modified_base 11: mod_base = OTHER; note = 2'-O-Methyl nucleotide
  modified_base 12: mod_base = OTHER; note = 2'-fluoro nucleotide
  modified_base 13: mod_base = OTHER; note = 2'-O-Methyl nucleotide
  modified_base 14: mod_base = OTHER; note = 2'-fluoro nucleotide
  modified_base 15: mod_base = OTHER; note = 2'-O-Methyl nucleotide
  modified_base 16: mod_base = OTHER; note = 2'-fluoro nucleotide
  modified_base 17: mod_base = OTHER; note = 2'-O-Methyl nucleotide
  modified_base 18: mod_base = OTHER; note = 2'-fluoro nucleotide
  modified_base 19: mod_base = OTHER; note = 2'-O-Methyl nucleotide
  modified_base 20: mod_base = OTHER; note = deoxy-thymine phosphorothioate
  misc_feature 1..19: note = RNA
  misc_feature 20..21: note = DNA
tcaccacataattacggggtt

SEQ ID NO: 1754 - DNA, 21 bp, synthetic construct
  misc_feature 1..21: note = Description of Artificial Sequence: Synthetic oligonucleotide
  source 1..21: mol_type = other DNA
  modified_base 1: mod_base = OTHER; note = 2'-O-Methyl nucleotide
  modified_base 2: mod_base = OTHER; note = 2'-O-Methyl nucleotide
  modified_base 3: mod_base = OTHER; note = 2'-fluoro nucleotide
  modified_base 4: mod_base = OTHER; note = 2'-O-Methyl nucleotide
  modified_base 5: mod_base = OTHER; note = 2'-fluoro nucleotide
  modified_base 6: mod_base = OTHER; note = 2'-O-Methyl nucleotide
  modified_base 7: mod_base = OTHER; note = 2'-fluoro nucleotide
  modified_base 8: mod_base = OTHER; note = 2'-O-Methyl nucleotide
  modified_base 9: mod_base = OTHER; note = 2'-fluoro nucleotide
  modified_base 10: mod_base = OTHER; note = 2'-O-Methyl nucleotide
  modified_base 11: mod_base = OTHER; note = 2'-fluoro nucleotide
  modified_base 12: mod_base = OTHER; note = 2'-O-Methyl nucleotide
  modified_base 13: mod_base = OTHER; note = 2'-fluoro nucleotide
  modified_base 14: mod_base = OTHER; note = 2'-O-Methyl nucleotide
  modified_base 15: mod_base = OTHER; note = 2'-fluoro nucleotide
  modified_base 16: mod_base = OTHER; note = 2'-O-Methyl nucleotide
  modified_base 17: mod_base = OTHER; note = 2'-fluoro nucleotide
  modified_base 18: mod_base = OTHER; note = 2'-O-Methyl nucleotide
  modified_base 19: mod_base = OTHER; note = 2'-fluoro nucleotide
  modified_base 20: mod_base = OTHER; note = deoxy-thymine phosphorothioate
  misc_feature 1..19: note = RNA
  misc_feature 20..21: note = DNA
ccgtaattatgtggtgacatt

SEQ ID NO: 1755 - DNA, 21 bp, synthetic construct
  misc_feature 1..21: note = Description of Artificial Sequence: Synthetic oligonucleotide
  source 1..21: mol_type = other DNA
  modified_base 1: mod_base = OTHER; note = 2'-fluoro nucleotide
  modified_base 2: mod_base = OTHER; note = 2'-fluoro nucleotide
  modified_base 3: mod_base = OTHER; note = 2'-O-Methyl nucleotide
  modified_base 4: mod_base = OTHER; note = 2'-fluoro nucleotide
  modified_base 5: mod_base = OTHER; note = 2'-O-Methyl nucleotide
  modified_base 6: mod_base = OTHER; note = 2'-fluoro nucleotide
  modified_base 7: mod_base = OTHER; note = 2'-O-Methyl nucleotide
  modified_base 8: mod_base = OTHER; note = 2'-fluoro nucleotide
  modified_base 9: mod_base = OTHER; note = 2'-O-Methyl nucleotide
  modified_base 10: mod_base = OTHER; note = 2'-fluoro nucleotide
  modified_base 11: mod_base = OTHER; note = 2'-O-Methyl nucleotide
  modified_base 12: mod_base = OTHER; note = 2'-fluoro nucleotide
  modified_base 13: mod_base = OTHER; note = 2'-O-Methyl nucleotide
  modified_base 14: mod_base = OTHER; note = 2'-fluoro nucleotide
  modified_base 15: mod_base = OTHER; note = 2'-O-Methyl nucleotide
  modified_base 16: mod_base = OTHER; note = 2'-fluoro nucleotide
  modified_base 17: mod_base = OTHER; note = 2'-O-Methyl nucleotide
  modified_base 18: mod_base = OTHER; note = 2'-fluoro nucleotide
  modified_base 19: mod_base = OTHER; note = 2'-O-Methyl nucleotide
  modified_base 20: mod_base = OTHER; note = deoxy-thymine phosphorothioate
  misc_feature 1..19: note = RNA
  misc_feature 20..21: note = DNA
tgtcaccacataattacggtt

SEQ ID NO: 1756 - DNA, 21 bp, synthetic construct
  misc_feature 1..21: note = Description of Artificial Sequence: Synthetic oligonucleotide
  source 1..21: mol_type = other DNA
  modified_base 1: mod_base = OTHER; note = 2'-O-Methyl nucleotide
  modified_base 2: mod_base = OTHER; note = 2'-O-Methyl nucleotide
  modified_base 3: mod_base = OTHER; note = 2'-fluoro nucleotide
  modified_base 4: mod_base = OTHER; note = 2'-O-Methyl nucleotide
  modified_base 5: mod_base = OTHER; note = 2'-fluoro nucleotide
  modified_base 6: mod_base = OTHER; note = 2'-O-Methyl nucleotide
  modified_base 7: mod_base = OTHER; note = 2'-fluoro nucleotide
  modified_base 8: mod_base = OTHER; note = 2'-O-Methyl nucleotide
  modified_base 9: mod_base = OTHER; note = 2'-fluoro nucleotide
  modified_base 10: mod_base = OTHER; note = 2'-O-Methyl nucleotide
  modified_base 11: mod_base = OTHER; note = 2'-fluoro nucleotide
  modified_base 12: mod_base = OTHER; note = 2'-O-Methyl nucleotide
  modified_base 13: mod_base = OTHER; note = 2'-fluoro nucleotide
  modified_base 14: mod_base = OTHER; note = 2'-O-Methyl nucleotide
  modified_base 15: mod_base = OTHER; note = 2'-fluoro nucleotide
  modified_base 16: mod_base = OTHER; note = 2'-O-Methyl nucleotide
  modified_base 17: mod_base = OTHER; note = 2'-fluoro nucleotide
  modified_base 18: mod_base = OTHER; note = 2'-O-Methyl nucleotide
  modified_base 19: mod_base = OTHER; note = 2'-fluoro nucleotide
  modified_base 20: mod_base = OTHER; note = deoxy-thymine phosphorothioate
  misc_feature 1..19: note = RNA
  misc_feature 20..21: note = DNA
gtaattatgtggtgacagatt

SEQ ID NO: 1757 - DNA, 21 bp, synthetic construct
  misc_feature 1..21: note = Description of Artificial Sequence: Synthetic oligonucleotide
  source 1..21: mol_type = other DNA
  modified_base 1: mod_base = OTHER; note = 2'-fluoro nucleotide
  modified_base 2: mod_base = OTHER; note = 2'-fluoro nucleotide
  modified_base 3: mod_base = OTHER; note = 2'-O-Methyl nucleotide
  modified_base 4: mod_base = OTHER; note = 2'-fluoro nucleotide
  modified_base 5: mod_base = OTHER; note = 2'-O-Methyl nucleotide
  modified_base 6: mod_base = OTHER; note = 2'-fluoro nucleotide
  modified_base 7: mod_base = OTHER; note = 2'-O-Methyl nucleotide
  modified_base 8: mod_base = OTHER; note = 2'-fluoro nucleotide
  modified_base 9: mod_base = OTHER; note = 2'-O-Methyl nucleotide
  modified_base 10: mod_base = OTHER; note = 2'-fluoro nucleotide
  modified_base 11: mod_base = OTHER; note = 2'-O-Methyl nucleotide
  modified_base 12: mod_base = OTHER; note = 2'-fluoro nucleotide
  modified_base 13: mod_base = OTHER; note = 2'-O-Methyl nucleotide
  modified_base 14: mod_base = OTHER; note = 2'-fluoro nucleotide
  modified_base 15: mod_base = OTHER; note = 2'-O-Methyl nucleotide
  modified_base 16: mod_base = OTHER; note = 2'-fluoro nucleotide
  modified_base 17: mod_base = OTHER; note = 2'-O-Methyl nucleotide
  modified_base 18: mod_base = OTHER; note = 2'-fluoro nucleotide
  modified_base 19: mod_base = OTHER; note = 2'-O-Methyl nucleotide
  modified_base 20: mod_base = OTHER; note = deoxy-thymine phosphorothioate
  misc_feature 1..19: note = RNA
  misc_feature 20..21: note = DNA
tctgtcaccacataattactt

SEQ ID NO: 1758 - DNA, 21 bp, synthetic construct
  misc_feature 1..21: note = Description of Artificial Sequence: Synthetic oligonucleotide
  source 1..21: mol_type = other DNA
  modified_base 1: mod_base = OTHER; note = 2'-O-Methyl nucleotide
  modified_base 2: mod_base = OTHER; note = 2'-O-Methyl nucleotide
  modified_base 3: mod_base = OTHER; note = 2'-fluoro nucleotide
  modified_base 4: mod_base = OTHER; note = 2'-O-Methyl nucleotide
  modified_base 5: mod_base = OTHER; note = 2'-fluoro nucleotide
  modified_base 6: mod_base = OTHER; note = 2'-O-Methyl nucleotide
  modified_base 7: mod_base = OTHER; note = 2'-fluoro nucleotide
  modified_base 8: mod_base = OTHER; note = 2'-O-Methyl nucleotide
  modified_base 9: mod_base = OTHER; note = 2'-fluoro nucleotide
  modified_base 10: mod_base = OTHER; note = 2'-O-Methyl nucleotide
  modified_base 11: mod_base = OTHER; note = 2'-fluoro nucleotide
  modified_base 12: mod_base = OTHER; note = 2'-O-Methyl nucleotide
  modified_base 13: mod_base = OTHER; note = 2'-fluoro nucleotide
  modified_base 14: mod_base = OTHER; note = 2'-O-Methyl nucleotide
  modified_base 15: mod_base = OTHER; note = 2'-fluoro nucleotide
  modified_base 16: mod_base = OTHER; note = 2'-O-Methyl nucleotide
  modified_base 17: mod_base = OTHER; note = 2'-fluoro nucleotide
  modified_base 18: mod_base = OTHER; note = 2'-O-Methyl nucleotide
  modified_base 19: mod_base = OTHER; note = 2'-fluoro nucleotide
  modified_base 20: mod_base = OTHER; note = deoxy-thymine phosphorothioate
  misc_feature 1..19: note = RNA
  misc_feature 20..21: note = DNA
taattatgtggtgacagattt

SEQ ID NO: 1759 - DNA, 21 bp, synthetic construct
  misc_feature 1..21: note = Description of Artificial Sequence: Synthetic oligonucleotide
  source 1..21: mol_type = other DNA
  modified_base 1: mod_base = OTHER; note = 2'-fluoro nucleotide
  modified_base 2: mod_base = OTHER; note = 2'-fluoro nucleotide
  modified_base 3: mod_base = OTHER; note = 2'-O-Methyl nucleotide
  modified_base 4: mod_base = OTHER; note = 2'-fluoro nucleotide
  modified_base 5: mod_base = OTHER; note = 2'-O-Methyl nucleotide
  modified_base 6: mod_base = OTHER; note = 2'-fluoro nucleotide
  modified_base 7: mod_base = OTHER; note = 2'-O-Methyl nucleotide
  modified_base 8: mod_base = OTHER; note = 2'-fluoro nucleotide
  modified_base 9: mod_base = OTHER; note = 2'-O-Methyl nucleotide
  modified_base 10: mod_base = OTHER; note = 2'-fluoro nucleotide
  modified_base 11: mod_base = OTHER; note = 2'-O-Methyl nucleotide
  modified_base 12: mod_base = OTHER; note = 2'-fluoro nucleotide
  modified_base 13: mod_base = OTHER; note = 2'-O-Methyl nucleotide
  modified_base 14: mod_base = OTHER; note = 2'-fluoro nucleotide
  modified_base 15: mod_base = OTHER; note = 2'-O-Methyl nucleotide
  modified_base 16: mod_base = OTHER; note = 2'-fluoro nucleotide
  modified_base 17: mod_base = OTHER; note = 2'-O-Methyl nucleotide
  modified_base 18: mod_base = OTHER; note = 2'-fluoro nucleotide
  modified_base 19: mod_base = OTHER; note = 2'-O-Methyl nucleotide
  modified_base 20: mod_base = OTHER; note = deoxy-thymine phosphorothioate
  misc_feature 1..19: note = RNA
  misc_feature 20..21: note = DNA
atctgtcaccacataattatt

SEQ ID NO: 1760 - DNA, 21 bp, synthetic construct
  misc_feature 1..21: note = Description of Artificial Sequence: Synthetic oligonucleotide
  source 1..21: mol_type = other DNA
  modified_base 1: mod_base = OTHER; note = 2'-O-Methyl nucleotide
  modified_base 2: mod_base = OTHER; note = 2'-O-Methyl nucleotide
  modified_base 3: mod_base = OTHER; note = 2'-fluoro nucleotide
  modified_base 4: mod_base = OTHER; note = 2'-O-Methyl nucleotide
  modified_base 5: mod_base = OTHER; note = 2'-fluoro nucleotide
  modified_base 6: mod_base = OTHER; note = 2'-O-Methyl nucleotide
  modified_base 7: mod_base = OTHER; note = 2'-fluoro nucleotide
  modified_base 8: mod_base = OTHER; note = 2'-O-Methyl nucleotide
  modified_base 9: mod_base = OTHER; note = 2'-fluoro nucleotide
  modified_base 10: mod_base = OTHER; note = 2'-O-Methyl nucleotide
  modified_base 11: mod_base = OTHER; note = 2'-fluoro nucleotide
  modified_base 12: mod_base = OTHER; note = 2'-O-Methyl nucleotide
  modified_base 13: mod_base = OTHER; note = 2'-fluoro nucleotide
  modified_base 14: mod_base = OTHER; note = 2'-O-Methyl nucleotide
  modified_base 15: mod_base = OTHER; note = 2'-fluoro nucleotide
  modified_base 16: mod_base = OTHER; note = 2'-O-Methyl nucleotide
  modified_base 17: mod_base = OTHER; note = 2'-fluoro nucleotide
  modified_base 18: mod_base = OTHER; note = 2'-O-Methyl nucleotide
  modified_base 19: mod_base = OTHER; note = 2'-fluoro nucleotide
  modified_base 20: mod_base = OTHER; note = deoxy-thymine phosphorothioate
  misc_feature 1..19: note = RNA
  misc_feature 20..21: note = DNA
aattatgtggtgacagatctt

SEQ ID NO: 1761 - DNA, 21 bp, synthetic construct
  misc_feature 1..21: note = Description of Artificial Sequence: Synthetic oligonucleotide
  source 1..21: mol_type = other DNA
  modified_base 1: mod_base = OTHER; note = 2'-fluoro nucleotide
  modified_base 2: mod_base = OTHER; note = 2'-fluoro nucleotide
  modified_base 3: mod_base = OTHER; note = 2'-O-Methyl nucleotide
  modified_base 4: mod_base = OTHER; note = 2'-fluoro nucleotide
  modified_base 5: mod_base = OTHER; note = 2'-O-Methyl nucleotide
  modified_base 6: mod_base = OTHER; note = 2'-fluoro nucleotide
  modified_base 7: mod_base = OTHER; note = 2'-O-Methyl nucleotide
  modified_base 8: mod_base = OTHER; note = 2'-fluoro nucleotide
  modified_base 9: mod_base = OTHER; note = 2'-O-Methyl nucleotide
  modified_base 10: mod_base = OTHER; note = 2'-fluoro nucleotide
  modified_base 11: mod_base = OTHER; note = 2'-O-Methyl nucleotide
  modified_base 12: mod_base = OTHER; note = 2'-fluoro nucleotide
  modified_base 13: mod_base = OTHER; note = 2'-O-Methyl nucleotide
  modified_base 14: mod_base = OTHER; note = 2'-fluoro nucleotide
  modified_base 15: mod_base = OTHER; note = 2'-O-Methyl nucleotide
  modified_base 16: mod_base = OTHER; note = 2'-fluoro nucleotide
  modified_base 17: mod_base = OTHER; note = 2'-O-Methyl nucleotide
  modified_base 18: mod_base = OTHER; note = 2'-fluoro nucleotide
  modified_base 19: mod_base = OTHER; note = 2'-O-Methyl nucleotide
  modified_base 20: mod_base = OTHER; note = deoxy-thymine phosphorothioate
  misc_feature 1..19: note = RNA
  misc_feature 20..21: note = DNA
gatctgtcaccacataatttt

SEQ ID NO: 1762 - DNA, 21 bp, synthetic construct
  misc_feature 1..21: note = Description of Artificial Sequence: Synthetic oligonucleotide
  source 1..21: mol_type = other DNA
  modified_base 1: mod_base = OTHER; note = 2'-O-Methyl nucleotide
  modified_base 2: mod_base = OTHER; note = 2'-O-Methyl nucleotide
  modified_base 3: mod_base = OTHER; note = 2'-fluoro nucleotide
  modified_base 4: mod_base = OTHER; note = 2'-O-Methyl nucleotide
  modified_base 5: mod_base = OTHER; note = 2'-fluoro nucleotide
  modified_base 6: mod_base = OTHER; note = 2'-O-Methyl nucleotide
  modified_base 7: mod_base = OTHER; note = 2'-fluoro nucleotide
  modified_base 8: mod_base = OTHER; note = 2'-O-Methyl nucleotide
  modified_base 9: mod_base = OTHER; note = 2'-fluoro nucleotide
  modified_base 10: mod_base = OTHER; note = 2'-O-Methyl nucleotide
  modified_base 11: mod_base = OTHER; note = 2'-fluoro nucleotide
  modified_base 12: mod_base = OTHER; note = 2'-O-Methyl nucleotide
  modified_base 13: mod_base = OTHER; note = 2'-fluoro nucleotide
  modified_base 14: mod_base = OTHER; note = 2'-O-Methyl nucleotide
  modified_base 15: mod_base = OTHER; note = 2'-fluoro nucleotide
  modified_base 16: mod_base = OTHER; note = 2'-O-Methyl nucleotide
  modified_base 17: mod_base = OTHER; note = 2'-fluoro nucleotide
  modified_base 18: mod_base = OTHER; note = 2'-O-Methyl nucleotide
  modified_base 19: mod_base = OTHER; note = 2'-fluoro nucleotide
  modified_base 20: mod_base = OTHER; note = deoxy-thymine phosphorothioate
  misc_feature 1..19: note = RNA
  misc_feature 20..21: note = DNA
attatgtggtgacagatcatt

SEQ ID NO: 1763 - DNA, 21 bp, synthetic construct
  misc_feature 1..21: note = Description of Artificial Sequence: Synthetic oligonucleotide
  source 1..21: mol_type = other DNA
  modified_base 1: mod_base = OTHER; note = 2'-fluoro nucleotide
  modified_base 2: mod_base = OTHER; note = 2'-fluoro nucleotide
  modified_base 3: mod_base = OTHER; note = 2'-O-Methyl nucleotide
  modified_base 4: mod_base = OTHER; note = 2'-fluoro nucleotide
  modified_base 5: mod_base = OTHER; note = 2'-O-Methyl nucleotide
  modified_base 6: mod_base = OTHER; note = 2'-fluoro nucleotide
  modified_base 7: mod_base = OTHER; note = 2'-O-Methyl nucleotide
  modified_base 8: mod_base = OTHER; note = 2'-fluoro nucleotide
  modified_base 9: mod_base = OTHER; note = 2'-O-Methyl nucleotide
  modified_base 10: mod_base = OTHER; note = 2'-fluoro nucleotide
  modified_base 11: mod_base = OTHER; note = 2'-O-Methyl nucleotide
  modified_base 12: mod_base = OTHER; note = 2'-fluoro nucleotide
  modified_base 13: mod_base = OTHER; note = 2'-O-Methyl nucleotide
  modified_base 14: mod_base = OTHER; note = 2'-fluoro nucleotide
  modified_base 15: mod_base = OTHER; note = 2'-O-Methyl nucleotide
  modified_base 16: mod_base = OTHER; note = 2'-fluoro nucleotide
  modified_base 17: mod_base = OTHER; note = 2'-O-Methyl nucleotide
  modified_base 18: mod_base = OTHER; note = 2'-fluoro nucleotide
  modified_base 19: mod_base = OTHER; note = 2'-O-Methyl nucleotide
  modified_base 20: mod_base = OTHER; note = deoxy-thymine phosphorothioate
  misc_feature 1..19: note = RNA
  misc_feature 20..21: note = DNA
tgatctgtcaccacataattt

SEQ ID NO: 1764 - DNA, 21 bp, synthetic construct
  misc_feature 1..21: note = Description of Artificial Sequence: Synthetic oligonucleotide
  source 1..21: mol_type = other DNA
  modified_base 1: mod_base = OTHER; note = 2'-O-Methyl nucleotide
  modified_base 2: mod_base = OTHER; note = 2'-O-Methyl nucleotide
  modified_base 3: mod_base = OTHER; note = 2'-fluoro nucleotide
  modified_base 4: mod_base = OTHER; note = 2'-O-Methyl nucleotide
  modified_base 5: mod_base = OTHER; note = 2'-fluoro nucleotide
  modified_base 6: mod_base = OTHER; note = 2'-O-Methyl nucleotide
  modified_base 7: mod_base = OTHER; note = 2'-fluoro nucleotide
  modified_base 8: mod_base = OTHER; note = 2'-O-Methyl nucleotide
  modified_base 9: mod_base = OTHER; note = 2'-fluoro nucleotide
  modified_base 10: mod_base = OTHER; note = 2'-O-Methyl nucleotide
  modified_base 11: mod_base = OTHER; note = 2'-fluoro nucleotide
  modified_base 12: mod_base = OTHER; note = 2'-O-Methyl nucleotide
  modified_base 13: mod_base = OTHER; note = 2'-fluoro nucleotide
  modified_base 14: mod_base = OTHER; note = 2'-O-Methyl nucleotide
  modified_base 15: mod_base = OTHER; note = 2'-fluoro nucleotide
  modified_base 16: mod_base = OTHER; note = 2'-O-Methyl nucleotide
  modified_base 17: mod_base = OTHER; note = 2'-fluoro nucleotide
  modified_base 18: mod_base = OTHER; note = 2'-O-Methyl nucleotide
  modified_base 19: mod_base = OTHER; note = 2'-fluoro nucleotide
  modified_base 20: mod_base = OTHER; note = deoxy-thymine phosphorothioate
  misc_feature 1..19: note = RNA
  misc_feature 20..21: note = DNA
ttatgtggtgacagatcactt

SEQ ID NO: 1765 - DNA, 21 bp, synthetic construct
  misc_feature 1..21: note = Description of Artificial Sequence: Synthetic oligonucleotide
  source 1..21: mol_type = other DNA
  modified_base 1: mod_base = OTHER; note = 2'-fluoro nucleotide
  modified_base 2: mod_base = OTHER; note = 2'-fluoro nucleotide
  modified_base 3: mod_base = OTHER; note = 2'-O-Methyl nucleotide
  modified_base 4: mod_base = OTHER; note = 2'-fluoro nucleotide
  modified_base 5: mod_base = OTHER; note = 2'-O-Methyl nucleotide
  modified_base 6: mod_base = OTHER; note = 2'-fluoro nucleotide
  modified_base 7: mod_base = OTHER; note = 2'-O-Methyl nucleotide
  modified_base 8: mod_base = OTHER; note = 2'-fluoro nucleotide
  modified_base 9: mod_base = OTHER; note = 2'-O-Methyl nucleotide
  modified_base 10: mod_base = OTHER; note = 2'-fluoro nucleotide
  modified_base 11: mod_base = OTHER; note = 2'-O-Methyl nucleotide
  modified_base 12: mod_base = OTHER; note = 2'-fluoro nucleotide
  modified_base 13: mod_base = OTHER; note = 2'-O-Methyl nucleotide
  modified_base 14: mod_base = OTHER; note = 2'-fluoro nucleotide
  modified_base 15: mod_base = OTHER; note = 2'-O-Methyl nucleotide
  modified_base 16: mod_base = OTHER; note = 2'-fluoro nucleotide
  modified_base 17: mod_base = OTHER; note = 2'-O-Methyl nucleotide
  modified_base 18: mod_base = OTHER; note = 2'-fluoro nucleotide
  modified_base 19: mod_base = OTHER; note = 2'-O-Methyl nucleotide
  modified_base 20: mod_base = OTHER; note = deoxy-thymine phosphorothioate
  misc_feature 1..19: note = RNA
  misc_feature 20..21: note = DNA
gtgatctgtcaccacataatt

SEQ ID NO: 1766 - DNA, 21 bp, synthetic construct
  misc_feature 1..21: note = Description of Artificial Sequence: Synthetic oligonucleotide
  source 1..21: mol_type = other DNA
  modified_base 1: mod_base = OTHER; note = 2'-O-Methyl nucleotide
  modified_base 2: mod_base = OTHER; note = 2'-O-Methyl nucleotide
  modified_base 3: mod_base = OTHER; note = 2'-fluoro nucleotide
  modified_base 4: mod_base = OTHER; note = 2'-O-Methyl nucleotide
  modified_base 5: mod_base = OTHER; note = 2'-fluoro nucleotide
  modified_base 6: mod_base = OTHER; note = 2'-O-Methyl nucleotide
  modified_base 7: mod_base = OTHER; note = 2'-fluoro nucleotide
  modified_base 8: mod_base = OTHER; note = 2'-O-Methyl nucleotide
  modified_base 9: mod_base = OTHER; note = 2'-fluoro nucleotide
  modified_base 10: mod_base = OTHER; note = 2'-O-Methyl nucleotide
  modified_base 11: mod_base = OTHER; note = 2'-fluoro nucleotide
  modified_base 12: mod_base = OTHER; note = 2'-O-Methyl nucleotide
  modified_base 13: mod_base = OTHER; note = 2'-fluoro nucleotide
  modified_base 14: mod_base = OTHER; note = 2'-O-Methyl nucleotide
  modified_base 15: mod_base = OTHER; note = 2'-fluoro nucleotide
  modified_base 16: mod_base = OTHER; note = 2'-O-Methyl nucleotide
  modified_base 17: mod_base = OTHER; note = 2'-fluoro nucleotide
  modified_base 18: mod_base = OTHER; note = 2'-O-Methyl nucleotide
  modified_base 19: mod_base = OTHER; note = 2'-fluoro nucleotide
  modified_base 20: mod_base = OTHER; note = deoxy-thymine phosphorothioate
  misc_feature 1..19: note = RNA
  misc_feature 20..21: note = DNA
atgtggtgacagatcacggtt

SEQ ID NO: 1767 - DNA, 21 bp, synthetic construct
  misc_feature 1..21: note = Description of Artificial Sequence: Synthetic oligonucleotide
  source 1..21: mol_type = other DNA
  modified_base 1: mod_base = OTHER; note = 2'-fluoro nucleotide
  modified_base 2: mod_base = OTHER; note = 2'-fluoro nucleotide
  modified_base 3: mod_base = OTHER; note = 2'-O-Methyl nucleotide
  modified_base 4: mod_base = OTHER; note = 2'-fluoro nucleotide
  modified_base 5: mod_base = OTHER; note = 2'-O-Methyl nucleotide
  modified_base 6: mod_base = OTHER; note = 2'-fluoro nucleotide
  modified_base 7: mod_base = OTHER; note = 2'-O-Methyl nucleotide
  modified_base 8: mod_base = OTHER; note = 2'-fluoro nucleotide
  modified_base 9: mod_base = OTHER; note = 2'-O-Methyl nucleotide
  modified_base 10: mod_base = OTHER; note = 2'-fluoro nucleotide
  modified_base 11: mod_base = OTHER; note = 2'-O-Methyl nucleotide
  modified_base 12: mod_base = OTHER; note = 2'-fluoro nucleotide
  modified_base 13: mod_base = OTHER; note = 2'-O-Methyl nucleotide
  modified_base 14: mod_base = OTHER; note = 2'-fluoro nucleotide
  modified_base 15: mod_base = OTHER; note = 2'-O-Methyl nucleotide
  modified_base 16: mod_base = OTHER; note = 2'-fluoro nucleotide
  modified_base 17: mod_base = OTHER; note = 2'-O-Methyl nucleotide
  modified_base 18: mod_base = OTHER; note = 2'-fluoro nucleotide
  modified_base 19: mod_base = OTHER; note = 2'-O-Methyl nucleotide
  modified_base 20: mod_base = OTHER; note = deoxy-thymine phosphorothioate
  misc_feature 1..19: note = RNA
  misc_feature 20..21: note = DNA
ccgtgatctgtcaccacattt

SEQ ID NO: 1768 - DNA, 21 bp, synthetic construct
  misc_feature 1..21: note = Description of Artificial Sequence: Synthetic oligonucleotide
  source 1..21: mol_type = other DNA
  modified_base 1: mod_base = OTHER; note = 2'-O-Methyl nucleotide
  modified_base 2: mod_base = OTHER; note = 2'-O-Methyl nucleotide
  modified_base 3: mod_base = OTHER; note = 2'-fluoro nucleotide
  modified_base 4: mod_base = OTHER; note = 2'-O-Methyl nucleotide
  modified_base 5: mod_base = OTHER; note = 2'-fluoro nucleotide
  modified_base 6: mod_base = OTHER; note = 2'-O-Methyl nucleotide
  modified_base 7: mod_base = OTHER; note = 2'-fluoro nucleotide
  modified_base 8: mod_base = OTHER; note = 2'-O-Methyl nucleotide
  modified_base 9: mod_base = OTHER; note = 2'-fluoro nucleotide
  modified_base 10: mod_base = OTHER; note = 2'-O-Methyl nucleotide
  modified_base 11: mod_base = OTHER; note = 2'-fluoro nucleotide
  modified_base 12: mod_base = OTHER; note = 2'-O-Methyl nucleotide
  modified_base 13: mod_base = OTHER; note = 2'-fluoro nucleotide
  modified_base 14: mod_base = OTHER; note = 2'-O-Methyl nucleotide
  modified_base 15: mod_base = OTHER; note = 2'-fluoro nucleotide
  modified_base 16: mod_base = OTHER; note = 2'-O-Methyl nucleotide
  modified_base 17: mod_base = OTHER; note = 2'-fluoro nucleotide
  modified_base 18: mod_base = OTHER; note = 2'-O-Methyl nucleotide
  modified_base 19: mod_base = OTHER; note = 2'-fluoro nucleotide
  modified_base 20: mod_base = OTHER; note = deoxy-thymine phosphorothioate
  misc_feature 1..19: note = RNA
  misc_feature 20..21: note = DNA
tggtgacagatcacggctctt

SEQ ID NO: 1769 - DNA, 21 bp, synthetic construct
  misc_feature 1..21: note = Description of Artificial Sequence: Synthetic oligonucleotide
  source 1..21: mol_type = other DNA
  modified_base 1: mod_base = OTHER; note = 2'-fluoro nucleotide
  modified_base 2: mod_base = OTHER; note = 2'-fluoro nucleotide
  modified_base 3: mod_base = OTHER; note = 2'-O-Methyl nucleotide
  modified_base 4: mod_base = OTHER; note = 2'-fluoro nucleotide
  modified_base 5: mod_base = OTHER; note = 2'-O-Methyl nucleotide
  modified_base 6: mod_base = OTHER; note = 2'-fluoro nucleotide
  modified_base 7: mod_base = OTHER; note = 2'-O-Methyl nucleotide
  modified_base 8: mod_base = OTHER; note = 2'-fluoro nucleotide
  modified_base 9: mod_base = OTHER; note = 2'-O-Methyl nucleotide
  modified_base 10: mod_base = OTHER; note = 2'-fluoro nucleotide
  modified_base 11: mod_base = OTHER; note = 2'-O-Methyl nucleotide
  modified_base 12: mod_base = OTHER; note = 2'-fluoro nucleotide
  modified_base 13: mod_base = OTHER; note = 2'-O-Methyl nucleotide
  modified_base 14: mod_base = OTHER; note = 2'-fluoro nucleotide
  modified_base 15: mod_base = OTHER; note = 2'-O-Methyl nucleotide
  modified_base 16: mod_base = OTHER; note = 2'-fluoro nucleotide
  modified_base 17: mod_base = OTHER; note = 2'-O-Methyl nucleotide
  modified_base 18: mod_base = OTHER; note = 2'-fluoro nucleotide
  modified_base 19: mod_base = OTHER; note = 2'-O-Methyl nucleotide
  modified_base 20: mod_base = OTHER; note = deoxy-thymine phosphorothioate
  misc_feature 1..19: note = RNA
  misc_feature 20..21: note = DNA
gagccgtgatctgtcaccatt

SEQ ID NO: 1770 - DNA, 21 bp, synthetic construct
  misc_feature 1..21: note = Description of Artificial Sequence: Synthetic oligonucleotide
  source 1..21: mol_type = other DNA
  modified_base 1: mod_base = OTHER; note = 2'-O-Methyl nucleotide
  modified_base 2: mod_base = OTHER; note = 2'-O-Methyl nucleotide
  modified_base 3: mod_base = OTHER; note = 2'-fluoro nucleotide
  modified_base 4: mod_base = OTHER; note = 2'-O-Methyl nucleotide
  modified_base 5: mod_base = OTHER; note = 2'-fluoro nucleotide
  modified_base 6: mod_base = OTHER; note = 2'-O-Methyl nucleotide
  modified_base 7: mod_base = OTHER; note = 2'-fluoro nucleotide
  modified_base 8: mod_base = OTHER; note = 2'-O-Methyl nucleotide
  modified_base 9: mod_base = OTHER; note = 2'-fluoro nucleotide
  modified_base 10: mod_base = OTHER; note = 2'-O-Methyl nucleotide
  modified_base 11: mod_base = OTHER; note = 2'-fluoro nucleotide
  modified_base 12: mod_base = OTHER; note = 2'-O-Methyl nucleotide
  modified_base 13: mod_base = OTHER; note = 2'-fluoro nucleotide
  modified_base 14: mod_base = OTHER; note = 2'-O-Methyl nucleotide
  modified_base 15: mod_base = OTHER; note = 2'-fluoro nucleotide
  modified_base 16: mod_base = OTHER; note = 2'-O-Methyl nucleotide
  modified_base 17: mod_base = OTHER; note = 2'-fluoro nucleotide
  modified_base 18: mod_base = OTHER; note = 2'-O-Methyl nucleotide
  modified_base 19: mod_base = OTHER; note = 2'-fluoro nucleotide
  modified_base 20: mod_base = OTHER; note = deoxy-thymine phosphorothioate
  misc_feature 1..19: note = RNA
  misc_feature 20..21: note = DNA
gtgacagatcacggctcgttt

SEQ ID NO: 1771 - DNA, 21 bp, synthetic construct
  misc_feature 1..21: note = Description of Artificial Sequence: Synthetic oligonucleotide
  source 1..21: mol_type = other DNA
  modified_base 1: mod_base = OTHER; note = 2'-fluoro nucleotide
  modified_base 2: mod_base = OTHER; note = 2'-fluoro nucleotide
  modified_base 3: mod_base = OTHER; note = 2'-O-Methyl nucleotide
  modified_base 4: mod_base = OTHER; note = 2'-fluoro nucleotide
  modified_base 5: mod_base = OTHER; note = 2'-O-Methyl nucleotide
  modified_base 6: mod_base = OTHER; note = 2'-fluoro nucleotide
  modified_base 7: mod_base = OTHER; note = 2'-O-Methyl nucleotide
  modified_base 8: mod_base = OTHER; note = 2'-fluoro nucleotide
  modified_base 9: mod_base = OTHER; note = 2'-O-Methyl nucleotide
  modified_base 10: mod_base = OTHER; note = 2'-fluoro nucleotide
  modified_base 11: mod_base = OTHER; note = 2'-O-Methyl nucleotide
  modified_base 12: mod_base = OTHER; note = 2'-fluoro nucleotide
  modified_base 13: mod_base = OTHER; note = 2'-O-Methyl nucleotide
  modified_base 14: mod_base = OTHER; note = 2'-fluoro nucleotide
  modified_base 15: mod_base = OTHER; note = 2'-O-Methyl nucleotide
  modified_base 16: mod_base = OTHER; note = 2'-fluoro nucleotide
  modified_base 17: mod_base = OTHER; note = 2'-O-Methyl nucleotide
  modified_base 18: mod_base = OTHER; note = 2'-fluoro nucleotide
  modified_base 19: mod_base = OTHER; note = 2'-O-Methyl nucleotide
  modified_base 20: mod_base = OTHER; note = deoxy-thymine phosphorothioate
  misc_feature 1..19: note = RNA
  misc_feature 20..21: note = DNA
acgagccgtgatctgtcactt

SEQ ID NO: 1772 - DNA, 21 bp, synthetic construct
  misc_feature 1..21: note = Description of Artificial Sequence: Synthetic oligonucleotide
  source 1..21: mol_type = other DNA
  modified_base 1: mod_base = OTHER; note = 2'-O-Methyl nucleotide
  modified_base 2: mod_base = OTHER; note = 2'-O-Methyl nucleotide
  modified_base 3: mod_base = OTHER; note = 2'-fluoro nucleotide
  modified_base 4: mod_base = OTHER; note = 2'-O-Methyl nucleotide
  modified_base 5: mod_base = OTHER; note = 2'-fluoro nucleotide
  modified_base 6: mod_base = OTHER; note = 2'-O-Methyl nucleotide
  modified_base 7: mod_base = OTHER; note = 2'-fluoro nucleotide
  modified_base 8: mod_base = OTHER; note = 2'-O-Methyl nucleotide
  modified_base 9: mod_base = OTHER; note = 2'-fluoro nucleotide
  modified_base 10: mod_base = OTHER; note = 2'-O-Methyl nucleotide
  modified_base 11: mod_base = OTHER; note = 2'-fluoro nucleotide
  modified_base 12: mod_base = OTHER; note = 2'-O-Methyl nucleotide
  modified_base 13: mod_base = OTHER; note = 2'-fluoro nucleotide
  modified_base 14: mod_base = OTHER; note = 2'-O-Methyl nucleotide
  modified_base 15: mod_base = OTHER; note = 2'-fluoro nucleotide
  modified_base 16: mod_base = OTHER; note = 2'-O-Methyl nucleotide
  modified_base 17: mod_base = OTHER; note = 2'-fluoro nucleotide
  modified_base 18: mod_base = OTHER; note = 2'-O-Methyl nucleotide
  modified_base 19: mod_base = OTHER; note = 2'-fluoro nucleotide
  modified_base 20: mod_base = OTHER; note = deoxy-thymine phosphorothioate
  misc_feature 1..19: note = RNA
  misc_feature 20..21: note = DNA
tgacagatcacggctcgtgtt

SEQ ID NO: 1773 - DNA, 21 bp, synthetic construct
  misc_feature 1..21: note = Description of Artificial Sequence: Synthetic oligonucleotide
  source 1..21: mol_type = other DNA
  modified_base 1: mod_base = OTHER; note = 2'-fluoro nucleotide
  modified_base 2: mod_base = OTHER; note = 2'-fluoro nucleotide
  modified_base 3: mod_base = OTHER; note = 2'-O-Methyl nucleotide
  modified_base 4: mod_base = OTHER; note = 2'-fluoro nucleotide
  modified_base 5: mod_base = OTHER; note = 2'-O-Methyl nucleotide
  modified_base 6: mod_base = OTHER; note = 2'-fluoro nucleotide
  modified_base 7: mod_base = OTHER; note = 2'-O-Methyl nucleotide
  modified_base 8: mod_base = OTHER; note = 2'-fluoro nucleotide
  modified_base 9: mod_base = OTHER; note = 2'-O-Methyl nucleotide
  modified_base 10: mod_base = OTHER; note = 2'-fluoro nucleotide
  modified_base 11: mod_base = OTHER; note = 2'-O-Methyl nucleotide
  modified_base 12: mod_base = OTHER; note = 2'-fluoro nucleotide
  modified_base 13: mod_base = OTHER; note = 2'-O-Methyl nucleotide
  modified_base 14: mod_base = OTHER; note = 2'-fluoro nucleotide
  modified_base 15: mod_base = OTHER; note = 2'-O-Methyl nucleotide
  modified_base 16: mod_base = OTHER; note = 2'-fluoro nucleotide
  modified_base 17: mod_base = OTHER; note = 2'-O-Methyl nucleotide
  modified_base 18: mod_base = OTHER; note = 2'-fluoro nucleotide
  modified_base 19: mod_base = OTHER; note = 2'-O-Methyl nucleotide
  modified_base 20: mod_base = OTHER; note = deoxy-thymine phosphorothioate
  misc_feature 1..19: note = RNA
  misc_feature 20..21: note = DNA
cacgagccgtgatctgtcatt

SEQ ID NO: 1774 - DNA, 21 bp, synthetic construct
  misc_feature 1..21: note = Description of Artificial Sequence: Synthetic oligonucleotide
  source 1..21: mol_type = other DNA
  modified_base 1: mod_base = OTHER; note = 2'-O-Methyl nucleotide
  modified_base 2: mod_base = OTHER; note = 2'-O-Methyl nucleotide
  modified_base 3: mod_base = OTHER; note = 2'-fluoro nucleotide
  modified_base 4: mod_base = OTHER; note = 2'-O-Methyl nucleotide
  modified_base 5: mod_base = OTHER; note = 2'-fluoro nucleotide
  modified_base 6: mod_base = OTHER; note = 2'-O-Methyl nucleotide
  modified_base 7: mod_base = OTHER; note = 2'-fluoro nucleotide
  modified_base 8: mod_base = OTHER; note = 2'-O-Methyl nucleotide
  modified_base 9: mod_base = OTHER; note = 2'-fluoro nucleotide
  modified_base 10: mod_base = OTHER; note = 2'-O-Methyl nucleotide
  modified_base 11: mod_base = OTHER; note = 2'-fluoro nucleotide
  modified_base 12: mod_base = OTHER; note = 2'-O-Methyl nucleotide
  modified_base 13: mod_base = OTHER; note = 2'-fluoro nucleotide
  modified_base 14: mod_base = OTHER; note = 2'-O-Methyl nucleotide
  modified_base 15: mod_base = OTHER; note = 2'-fluoro nucleotide
  modified_base 16: mod_base = OTHER; note = 2'-O-Methyl nucleotide
  modified_base 17: mod_base = OTHER; note = 2'-fluoro nucleotide
  modified_base 18: mod_base = OTHER; note = 2'-O-Methyl nucleotide
  modified_base 19: mod_base = OTHER; note = 2'-fluoro nucleotide
  modified_base 20: mod_base = OTHER; note = deoxy-thymine phosphorothioate
  misc_feature 1..19: note = RNA
  misc_feature 20..21: note = DNA
gacagatcacggctcgtgctt

SEQ ID NO: 1775 - DNA, 21 bp, synthetic construct
  misc_feature 1..21: note = Description of Artificial Sequence: Synthetic oligonucleotide
  source 1..21: mol_type = other DNA
  modified_base 1: mod_base = OTHER; note = 2'-fluoro nucleotide
  modified_base 2: mod_base = OTHER; note = 2'-fluoro nucleotide
  modified_base 3: mod_base = OTHER; note = 2'-O-Methyl nucleotide
  modified_base 4: mod_base = OTHER; note = 2'-fluoro nucleotide
  modified_base 5: mod_base = OTHER; note = 2'-O-Methyl nucleotide
  modified_base 6: mod_base = OTHER; note = 2'-fluoro nucleotide
  modified_base 7: mod_base = OTHER; note = 2'-O-Methyl nucleotide
  modified_base 8: mod_base = OTHER; note = 2'-fluoro nucleotide
  modified_base 9: mod_base = OTHER; note = 2'-O-Methyl nucleotide
  modified_base 10: mod_base = OTHER; note = 2'-fluoro nucleotide
  modified_base 11: mod_base = OTHER; note = 2'-O-Methyl nucleotide
  modified_base 12: mod_base = OTHER; note = 2'-fluoro nucleotide
  modified_base 13: mod_base = OTHER; note = 2'-O-Methyl nucleotide
  modified_base 14: mod_base = OTHER; note = 2'-fluoro nucleotide
  modified_base 15: mod_base = OTHER; note = 2'-O-Methyl nucleotide
  modified_base 16: mod_base = OTHER; note = 2'-fluoro nucleotide
  modified_base 17: mod_base = OTHER; note = 2'-O-Methyl nucleotide
  modified_base 18: mod_base = OTHER; note = 2'-fluoro nucleotide
  modified_base 19: mod_base = OTHER; note = 2'-O-Methyl nucleotide
  modified_base 20: mod_base = OTHER; note = deoxy-thymine phosphorothioate
  misc_feature 1..19: note = RNA
  misc_feature 20..21: note = DNA
gcacgagccgtgatctgtctt

SEQ ID NO: 1776 - DNA, 21 bp, synthetic construct
  misc_feature 1..21: note = Description of Artificial Sequence: Synthetic oligonucleotide
  source 1..21: mol_type = other DNA
  modified_base 1: mod_base = OTHER; note = 2'-O-Methyl nucleotide
  modified_base 2: mod_base = OTHER; note = 2'-O-Methyl nucleotide
  modified_base 3: mod_base = OTHER; note = 2'-fluoro nucleotide
  modified_base 4: mod_base = OTHER; note = 2'-O-Methyl nucleotide
  modified_base 5: mod_base = OTHER; note = 2'-fluoro nucleotide
  modified_base 6: mod_base = OTHER; note = 2'-O-Methyl nucleotide
  modified_base 7: mod_base = OTHER; note = 2'-fluoro nucleotide
  modified_base 8: mod_base = OTHER; note = 2'-O-Methyl nucleotide
  modified_base 9: mod_base = OTHER; note = 2'-fluoro nucleotide
  modified_base 10: mod_base = OTHER; note = 2'-O-Methyl nucleotide
  modified_base 11: mod_base = OTHER; note = 2'-fluoro nucleotide
  modified_base 12: mod_base = OTHER; note = 2'-O-Methyl nucleotide
  modified_base 13: mod_base = OTHER; note = 2'-fluoro nucleotide
  modified_base 14: mod_base = OTHER; note = 2'-O-Methyl nucleotide
  modified_base 15: mod_base = OTHER; note = 2'-fluoro nucleotide
  modified_base 16: mod_base = OTHER; note = 2'-O-Methyl nucleotide
  modified_base 17: mod_base = OTHER; note = 2'-fluoro nucleotide
  modified_base 18: mod_base = OTHER; note = 2'-O-Methyl nucleotide
  modified_base 19: mod_base = OTHER; note = 2'-fluoro nucleotide
  modified_base 20: mod_base = OTHER; note = deoxy-thymine phosphorothioate
  misc_feature 1..19: note = RNA
  misc_feature 20..21: note = DNA
acagatcacggctcgtgcgtt

SEQ ID NO: 1777 - DNA, 21 bp, synthetic construct
  misc_feature 1..21: note = Description of Artificial Sequence: Synthetic oligonucleotide
  source 1..21: mol_type = other DNA
  modified_base 1: mod_base = OTHER; note = 2'-fluoro nucleotide
  modified_base 2: mod_base = OTHER; note = 2'-fluoro nucleotide
  modified_base 3: mod_base = OTHER; note = 2'-O-Methyl nucleotide
  modified_base 4: mod_base = OTHER; note = 2'-fluoro nucleotide
  modified_base 5: mod_base = OTHER; note = 2'-O-Methyl nucleotide
  modified_base 6: mod_base = OTHER; note = 2'-fluoro nucleotide
  modified_base 7: mod_base = OTHER; note = 2'-O-Methyl nucleotide
  modified_base 8: mod_base = OTHER; note = 2'-fluoro nucleotide
  modified_base 9: mod_base = OTHER; note = 2'-O-Methyl nucleotide
  modified_base 10: mod_base = OTHER; note = 2'-fluoro nucleotide
  modified_base 11: mod_base = OTHER; note = 2'-O-Methyl nucleotide
  modified_base 12: mod_base = OTHER; note = 2'-fluoro nucleotide
  modified_base 13: mod_base = OTHER; note = 2'-O-Methyl nucleotide
  modified_base 14: mod_base = OTHER; note = 2'-fluoro nucleotide
  modified_base 15: mod_base = OTHER; note = 2'-O-Methyl nucleotide
  modified_base 16: mod_base = OTHER; note = 2'-fluoro nucleotide
  modified_base 17: mod_base = OTHER; note = 2'-O-Methyl nucleotide
  modified_base 18: mod_base = OTHER; note = 2'-fluoro nucleotide
  modified_base 19: mod_base = OTHER; note = 2'-O-Methyl nucleotide
  modified_base 20: mod_base = OTHER; note = deoxy-thymine phosphorothioate
  misc_feature 1..19: note = RNA
  misc_feature 20..21: note = DNA
cgcacgagccgtgatctgttt

SEQ ID NO: 1778 - DNA, 21 bp, synthetic construct
  misc_feature 1..21: note = Description of Artificial Sequence: Synthetic oligonucleotide
  source 1..21: mol_type = other DNA
  modified_base 1: mod_base = OTHER; note = 2'-O-Methyl nucleotide
  modified_base 2: mod_base = OTHER; note = 2'-O-Methyl nucleotide
  modified_base 3: mod_base = OTHER; note = 2'-fluoro nucleotide
  modified_base 4: mod_base = OTHER; note = 2'-O-Methyl nucleotide
  modified_base 5: mod_base = OTHER; note = 2'-fluoro nucleotide
  modified_base 6: mod_base = OTHER; note = 2'-O-Methyl nucleotide
  modified_base 7: mod_base = OTHER; note = 2'-fluoro nucleotide
  modified_base 8: mod_base = OTHER; note = 2'-O-Methyl nucleotide
  modified_base 9: mod_base = OTHER; note = 2'-fluoro nucleotide
  modified_base 10: mod_base = OTHER; note = 2'-O-Methyl nucleotide
  modified_base 11: mod_base = OTHER; note = 2'-fluoro nucleotide
  modified_base 12: mod_base = OTHER; note = 2'-O-Methyl nucleotide
  modified_base 13: mod_base = OTHER; note = 2'-fluoro nucleotide
  modified_base 14: mod_base = OTHER; note = 2'-O-Methyl nucleotide
  modified_base 15: mod_base = OTHER; note = 2'-fluoro nucleotide
  modified_base 16: mod_base = OTHER; note = 2'-O-Methyl nucleotide
  modified_base 17: mod_base = OTHER; note = 2'-fluoro nucleotide
  modified_base 18: mod_base = OTHER; note = 2'-O-Methyl nucleotide
  modified_base 19: mod_base = OTHER; note = 2'-fluoro nucleotide
  modified_base 20: mod_base = OTHER; note = deoxy-thymine phosphorothioate
  misc_feature 1..19: note = RNA
  misc_feature 20..21: note = DNA
cagatcacggctcgtgcgttt

SEQ ID NO: 1779 - DNA, 21 bp, synthetic construct
  misc_feature 1..21: note = Description of Artificial Sequence: Synthetic oligonucleotide
  source 1..21: mol_type = other DNA
  modified_base 1: mod_base = OTHER; note = 2'-fluoro nucleotide
  modified_base 2: mod_base = OTHER; note = 2'-fluoro nucleotide
  modified_base 3: mod_base = OTHER; note = 2'-O-Methyl nucleotide
  modified_base 4: mod_base = OTHER; note = 2'-fluoro nucleotide
  modified_base 5: mod_base = OTHER; note = 2'-O-Methyl nucleotide
  modified_base 6: mod_base = OTHER; note = 2'-fluoro nucleotide
  modified_base 7: mod_base = OTHER; note = 2'-O-Methyl nucleotide
  modified_base 8: mod_base = OTHER; note = 2'-fluoro nucleotide
  modified_base 9: mod_base = OTHER; note = 2'-O-Methyl nucleotide
  modified_base 10: mod_base = OTHER; note = 2'-fluoro nucleotide
  modified_base 11: mod_base = OTHER; note = 2'-O-Methyl nucleotide
  modified_base 12: mod_base = OTHER; note = 2'-fluoro nucleotide
  modified_base 13: mod_base = OTHER; note = 2'-O-Methyl nucleotide
  modified_base 14: mod_base = OTHER; note = 2'-fluoro nucleotide
  modified_base 15: mod_base = OTHER; note = 2'-O-Methyl nucleotide
  modified_base 16: mod_base = OTHER; note = 2'-fluoro nucleotide
  modified_base 17: mod_base = OTHER; note = 2'-O-Methyl nucleotide
  modified_base 18: mod_base = OTHER; note = 2'-fluoro nucleotide
  modified_base 19: mod_base = OTHER; note = 2'-O-Methyl nucleotide
  modified_base 20: mod_base = OTHER; note = deoxy-thymine phosphorothioate
  misc_feature 1..19: note = RNA
  misc_feature 20..21: note = DNA
acgcacgagccgtgatctgtt

SEQ ID NO: 1780 - DNA, 21 bp, synthetic construct
  misc_feature 1..21: note = Description of Artificial Sequence: Synthetic oligonucleotide
  source 1..21: mol_type = other DNA
  modified_base 1: mod_base = OTHER; note = 2'-O-Methyl nucleotide
  modified_base 2: mod_base = OTHER; note = 2'-O-Methyl nucleotide
  modified_base 3: mod_base = OTHER; note = 2'-fluoro nucleotide
  modified_base 4: mod_base = OTHER; note = 2'-O-Methyl nucleotide
  modified_base 5: mod_base = OTHER; note = 2'-fluoro nucleotide
  modified_base 6: mod_base = OTHER; note = 2'-O-Methyl nucleotide
  modified_base 7: mod_base = OTHER; note = 2'-fluoro nucleotide
  modified_base 8: mod_base = OTHER; note = 2'-O-Methyl nucleotide
  modified_base 9: mod_base = OTHER; note = 2'-fluoro nucleotide
  modified_base 10: mod_base = OTHER; note = 2'-O-Methyl nucleotide
  modified_base 11: mod_base = OTHER; note = 2'-fluoro nucleotide
  modified_base 12: mod_base = OTHER; note = 2'-O-Methyl nucleotide
  modified_base 13: mod_base = OTHER; note = 2'-fluoro nucleotide
  modified_base 14: mod_base = OTHER; note = 2'-O-Methyl nucleotide
  modified_base 15: mod_base = OTHER; note = 2'-fluoro nucleotide
  modified_base 16: mod_base = OTHER; note = 2'-O-Methyl nucleotide
  modified_base 17: mod_base = OTHER; note = 2'-fluoro nucleotide
  modified_base 18: mod_base = OTHER; note = 2'-O-Methyl nucleotide
  modified_base 19: mod_base = OTHER; note = 2'-fluoro nucleotide
  modified_base 20: mod_base = OTHER; note = deoxy-thymine phosphorothioate
  misc_feature 1..19: note = RNA
  misc_feature 20..21: note = DNA
agatcacggctcgtgcgtctt

SEQ ID NO: 1781 - DNA, 21 bp, synthetic construct
  misc_feature 1..21: note = Description of Artificial Sequence: Synthetic oligonucleotide
  source 1..21: mol_type = other DNA
  modified_base 1: mod_base = OTHER; note = 2'-fluoro nucleotide
  modified_base 2: mod_base = OTHER; note = 2'-fluoro nucleotide
  modified_base 3: mod_base = OTHER; note = 2'-O-Methyl nucleotide
  modified_base 4: mod_base = OTHER; note = 2'-fluoro nucleotide
  modified_base 5: mod_base = OTHER; note = 2'-O-Methyl nucleotide
  modified_base 6: mod_base = OTHER; note = 2'-fluoro nucleotide
  modified_base 7: mod_base = OTHER; note = 2'-O-Methyl nucleotide
  modified_base 8: mod_base = OTHER; note = 2'-fluoro nucleotide
  modified_base 9: mod_base = OTHER; note = 2'-O-Methyl nucleotide
  modified_base 10: mod_base = OTHER; note = 2'-fluoro nucleotide
  modified_base 11: mod_base = OTHER; note = 2'-O-Methyl nucleotide
  modified_base 12: mod_base = OTHER; note = 2'-fluoro nucleotide
  modified_base 13: mod_base = OTHER; note = 2'-O-Methyl nucleotide
  modified_base 14: mod_base = OTHER; note = 2'-fluoro nucleotide
  modified_base 15: mod_base = OTHER; note = 2'-O-Methyl nucleotide
  modified_base 16: mod_base = OTHER; note = 2'-fluoro nucleotide
  modified_base 17: mod_base = OTHER; note = 2'-O-Methyl nucleotide
  modified_base 18: mod_base = OTHER; note = 2'-fluoro nucleotide
  modified_base 19: mod_base = OTHER; note = 2'-O-Methyl nucleotide
  modified_base 20: mod_base = OTHER; note = deoxy-thymine phosphorothioate
  misc_feature 1..19: note = RNA
  misc_feature 20..21: note = DNA
gacgcacgagccgtgatcttt

SEQ ID NO: 1782 - DNA, 21 bp, synthetic construct
  misc_feature 1..21: note = Description of Artificial Sequence: Synthetic oligonucleotide
  source 1..21: mol_type = other DNA
  modified_base 1: mod_base = OTHER; note = 2'-O-Methyl nucleotide
  modified_base 2: mod_base = OTHER; note = 2'-O-Methyl nucleotide
  modified_base 3: mod_base = OTHER; note = 2'-fluoro nucleotide
  modified_base 4: mod_base = OTHER; note = 2'-O-Methyl nucleotide
  modified_base 5: mod_base = OTHER; note = 2'-fluoro nucleotide
  modified_base 6: mod_base = OTHER; note = 2'-O-Methyl nucleotide
  modified_base 7: mod_base = OTHER; note = 2'-fluoro nucleotide
  modified_base 8: mod_base = OTHER; note = 2'-O-Methyl nucleotide
  modified_base 9: mod_base = OTHER; note = 2'-fluoro nucleotide
  modified_base 10: mod_base = OTHER; note = 2'-O-Methyl nucleotide
  modified_base 11: mod_base = OTHER; note = 2'-fluoro nucleotide
  modified_base 12: mod_base = OTHER; note = 2'-O-Methyl nucleotide
  modified_base 13: mod_base = OTHER; note = 2'-fluoro nucleotide
  modified_base 14: mod_base = OTHER; note = 2'-O-Methyl nucleotide
  modified_base 15: mod_base = OTHER; note = 2'-fluoro nucleotide
  modified_base 16: mod_base = OTHER; note = 2'-O-Methyl nucleotide
  modified_base 17: mod_base = OTHER; note = 2'-fluoro nucleotide
  modified_base 18: mod_base = OTHER; note = 2'-O-Methyl nucleotide
  modified_base 19: mod_base = OTHER; note = 2'-fluoro nucleotide
  modified_base 20: mod_base = OTHER; note = deoxy-thymine phosphorothioate
  misc_feature 1..19: note = RNA
  misc_feature 20..21: note = DNA
gatcacggctcgtgcgtcctt

SEQ ID NO: 1783 - DNA, 21 bp, synthetic construct
  misc_feature 1..21: note = Description of Artificial Sequence: Synthetic oligonucleotide
  source 1..21: mol_type = other DNA
  modified_base 1: mod_base = OTHER; note = 2'-fluoro nucleotide
  modified_base 2: mod_base = OTHER; note = 2'-fluoro nucleotide
  modified_base 3: mod_base = OTHER; note = 2'-O-Methyl nucleotide
  modified_base 4: mod_base = OTHER; note = 2'-fluoro nucleotide
  modified_base 5: mod_base = OTHER; note = 2'-O-Methyl nucleotide
  modified_base 6: mod_base = OTHER; note = 2'-fluoro nucleotide
  modified_base 7: mod_base = OTHER; note = 2'-O-Methyl nucleotide
  modified_base 8: mod_base = OTHER; note = 2'-fluoro nucleotide
  modified_base 9: mod_base = OTHER; note = 2'-O-Methyl nucleotide
  modified_base 10: mod_base = OTHER; note = 2'-fluoro nucleotide
  modified_base 11: mod_base = OTHER; note = 2'-O-Methyl nucleotide
  modified_base 12: mod_base = OTHER; note = 2'-fluoro nucleotide
  modified_base 13: mod_base = OTHER; note = 2'-O-Methyl nucleotide
  modified_base 14: mod_base = OTHER; note = 2'-fluoro nucleotide
  modified_base 15: mod_base = OTHER; note = 2'-O-Methyl nucleotide
  modified_base 16: mod_base = OTHER; note = 2'-fluoro nucleotide
  modified_base 17: mod_base = OTHER; note = 2'-O-Methyl nucleotide
  modified_base 18: mod_base = OTHER; note = 2'-fluoro nucleotide
  modified_base 19: mod_base = OTHER; note = 2'-O-Methyl nucleotide
  modified_base 20: mod_base = OTHER; note = deoxy-thymine phosphorothioate
  misc_feature 1..19: note = RNA
  misc_feature 20..21: note = DNA
ggacgcacgagccgtgatctt

SEQ ID NO: 1784 - DNA, 21 bp, synthetic construct
  misc_feature 1..21: note = Description of Artificial Sequence: Synthetic oligonucleotide
  source 1..21: mol_type = other DNA
  modified_base 1: mod_base = OTHER; note = 2'-O-Methyl nucleotide
  modified_base 2: mod_base = OTHER; note = 2'-O-Methyl nucleotide
  modified_base 3: mod_base = OTHER; note = 2'-fluoro nucleotide
  modified_base 4: mod_base = OTHER; note = 2'-O-Methyl nucleotide
  modified_base 5: mod_base = OTHER; note = 2'-fluoro nucleotide
  modified_base 6: mod_base = OTHER; note = 2'-O-Methyl nucleotide
  modified_base 7: mod_base = OTHER; note = 2'-fluoro nucleotide
  modified_base 8: mod_base = OTHER; note = 2'-O-Methyl nucleotide
  modified_base 9: mod_base = OTHER; note = 2'-fluoro nucleotide
  modified_base 10: mod_base = OTHER; note = 2'-O-Methyl nucleotide
  modified_base 11: mod_base = OTHER; note = 2'-fluoro nucleotide
  modified_base 12: mod_base = OTHER; note = 2'-O-Methyl nucleotide
  modified_base 13: mod_base = OTHER; note = 2'-fluoro nucleotide
  modified_base 14: mod_base = OTHER; note = 2'-O-Methyl nucleotide
  modified_base 15: mod_base = OTHER; note = 2'-fluoro nucleotide
  modified_base 16: mod_base = OTHER; note = 2'-O-Methyl nucleotide
  modified_base 17: mod_base = OTHER; note = 2'-fluoro nucleotide
  modified_base 18: mod_base = OTHER; note = 2'-O-Methyl nucleotide
  modified_base 19: mod_base = OTHER; note = 2'-fluoro nucleotide
  modified_base 20: mod_base = OTHER; note = deoxy-thymine phosphorothioate
  misc_feature 1..19: note = RNA
  misc_feature 20..21: note = DNA
atcacggctcgtgcgtccgtt

SEQ ID NO: 1785 - DNA, 21 bp, synthetic construct
  misc_feature 1..21: note = Description of Artificial Sequence: Synthetic oligonucleotide
  source 1..21: mol_type = other DNA
  modified_base 1: mod_base = OTHER; note = 2'-fluoro nucleotide
  modified_base 2: mod_base = OTHER; note = 2'-fluoro nucleotide
  modified_base 3: mod_base = OTHER; note = 2'-O-Methyl nucleotide
  modified_base 4: mod_base = OTHER; note = 2'-fluoro nucleotide
  modified_base 5: mod_base = OTHER; note = 2'-O-Methyl nucleotide
  modified_base 6: mod_base = OTHER; note = 2'-fluoro nucleotide
  modified_base 7: mod_base = OTHER; note = 2'-O-Methyl nucleotide
  modified_base 8: mod_base = OTHER; note = 2'-fluoro nucleotide
  modified_base 9: mod_base = OTHER; note = 2'-O-Methyl nucleotide
  modified_base 10: mod_base = OTHER; note = 2'-fluoro nucleotide
  modified_base 11: mod_base = OTHER; note = 2'-O-Methyl nucleotide
  modified_base 12: mod_base = OTHER; note = 2'-fluoro nucleotide
  modified_base 13: mod_base = OTHER; note = 2'-O-Methyl nucleotide
  modified_base 14: mod_base = OTHER; note = 2'-fluoro nucleotide
  modified_base 15: mod_base = OTHER; note = 2'-O-Methyl nucleotide
  modified_base 16: mod_base = OTHER; note = 2'-fluoro nucleotide
  modified_base 17: mod_base = OTHER; note = 2'-O-Methyl nucleotide
  modified_base 18: mod_base = OTHER; note = 2'-fluoro nucleotide
  modified_base 19: mod_base = OTHER; note = 2'-O-Methyl nucleotide
  modified_base 20: mod_base = OTHER; note = deoxy-thymine phosphorothioate
  misc_feature 1..19: note = RNA
  misc_feature 20..21: note = DNA
cggacgcacgagccgtgattt

SEQ ID NO: 1786 - DNA, 21 bp, synthetic construct
  misc_feature 1..21: note = Description of Artificial Sequence: Synthetic oligonucleotide
  source 1..21: mol_type = other DNA
  modified_base 1: mod_base = OTHER; note = 2'-O-Methyl nucleotide
  modified_base 2: mod_base = OTHER; note = 2'-O-Methyl nucleotide
  modified_base 3: mod_base = OTHER; note = 2'-fluoro nucleotide
  modified_base 4: mod_base = OTHER; note = 2'-O-Methyl nucleotide
  modified_base 5: mod_base = OTHER; note = 2'-fluoro nucleotide
  modified_base 6: mod_base = OTHER; note = 2'-O-Methyl nucleotide
  modified_base 7: mod_base = OTHER; note = 2'-fluoro nucleotide
  modified_base 8: mod_base = OTHER; note = 2'-O-Methyl nucleotide
  modified_base 9: mod_base = OTHER; note = 2'-fluoro nucleotide
  modified_base 10: mod_base = OTHER; note = 2'-O-Methyl nucleotide
  modified_base 11: mod_base = OTHER; note = 2'-fluoro nucleotide
  modified_base 12: mod_base = OTHER; note = 2'-O-Methyl nucleotide
  modified_base 13: mod_base = OTHER; note = 2'-fluoro nucleotide
  modified_base 14: mod_base = OTHER; note = 2'-O-Methyl nucleotide
  modified_base 15: mod_base = OTHER; note = 2'-fluoro nucleotide
  modified_base 16: mod_base = OTHER; note = 2'-O-Methyl nucleotide
  modified_base 17: mod_base = OTHER; note = 2'-fluoro nucleotide
  modified_base 18: mod_base = OTHER; note = 2'-O-Methyl nucleotide
  modified_base 19: mod_base = OTHER; note = 2'-fluoro nucleotide
  modified_base 20: mod_base = OTHER; note = deoxy-thymine phosphorothioate
  misc_feature 1..19: note = RNA
  misc_feature 20..21: note = DNA
tcacggctcgtgcgtccgatt

SEQ ID NO: 1787 - DNA, 21 bp, synthetic construct
  misc_feature 1..21: note = Description of Artificial Sequence: Synthetic oligonucleotide
  source 1..21: mol_type = other DNA
  modified_base 1: mod_base = OTHER; note = 2'-fluoro nucleotide
  modified_base 2: mod_base = OTHER; note = 2'-fluoro nucleotide
  modified_base 3: mod_base = OTHER; note = 2'-O-Methyl nucleotide
  modified_base 4: mod_base = OTHER; note = 2'-fluoro nucleotide
  modified_base 5: mod_base = OTHER; note = 2'-O-Methyl nucleotide
  modified_base 6: mod_base = OTHER; note = 2'-fluoro nucleotide
  modified_base 7: mod_base = OTHER; note = 2'-O-Methyl nucleotide
  modified_base 8: mod_base = OTHER; note = 2'-fluoro nucleotide
  modified_base 9: mod_base = OTHER; note = 2'-O-Methyl nucleotide
  modified_base 10: mod_base = OTHER; note = 2'-fluoro nucleotide
  modified_base 11: mod_base = OTHER; note = 2'-O-Methyl nucleotide
  modified_base 12: mod_base = OTHER; note = 2'-fluoro nucleotide
  modified_base 13: mod_base = OTHER; note = 2'-O-Methyl nucleotide
  modified_base 14: mod_base = OTHER; note = 2'-fluoro nucleotide
  modified_base 15: mod_base = OTHER; note = 2'-O-Methyl nucleotide
  modified_base 16: mod_base = OTHER; note = 2'-fluoro nucleotide
  modified_base 17: mod_base = OTHER; note = 2'-O-Methyl nucleotide
  modified_base 18: mod_base = OTHER; note = 2'-fluoro nucleotide
  modified_base 19: mod_base = OTHER; note = 2'-O-Methyl nucleotide
  modified_base 20: mod_base = OTHER; note = deoxy-thymine phosphorothioate
  misc_feature 1..19: note = RNA
  misc_feature 20..21: note = DNA
tcggacgcacgagccgtgatt

SEQ ID NO: 1788 - DNA, 21 bp, synthetic construct
  misc_feature 1..21: note = Description of Artificial Sequence: Synthetic oligonucleotide
  source 1..21: mol_type = other DNA
  modified_base 1: mod_base = OTHER; note = 2'-O-Methyl nucleotide
  modified_base 2: mod_base = OTHER; note = 2'-O-Methyl nucleotide
  modified_base 3: mod_base = OTHER; note = 2'-fluoro nucleotide
  modified_base 4: mod_base = OTHER; note = 2'-O-Methyl nucleotide
  modified_base 5: mod_base = OTHER; note = 2'-fluoro nucleotide
  modified_base 6: mod_base = OTHER; note = 2'-O-Methyl nucleotide
  modified_base 7: mod_base = OTHER; note = 2'-fluoro nucleotide
  modified_base 8: mod_base = OTHER; note = 2'-O-Methyl nucleotide
  modified_base 9: mod_base = OTHER; note = 2'-fluoro nucleotide
  modified_base 10: mod_base = OTHER; note = 2'-O-Methyl nucleotide
  modified_base 11: mod_base = OTHER; note = 2'-fluoro nucleotide
  modified_base 12: mod_base = OTHER; note = 2'-O-Methyl nucleotide
  modified_base 13: mod_base = OTHER; note = 2'-fluoro nucleotide
  modified_base 14: mod_base = OTHER; note = 2'-O-Methyl nucleotide
  modified_base 15: mod_base = OTHER; note = 2'-fluoro nucleotide
  modified_base 16: mod_base = OTHER; note = 2'-O-Methyl nucleotide
  modified_base 17: mod_base = OTHER; note = 2'-fluoro nucleotide
  modified_base 18: mod_base = OTHER; note = 2'-O-Methyl nucleotide
  modified_base 19: mod_base = OTHER; note = 2'-fluoro nucleotide
  modified_base 20: mod_base = OTHER; note = deoxy-thymine phosphorothioate
  misc_feature 1..19: note = RNA
  misc_feature 20..21: note = DNA
cacggctcgtgcgtccgagtt

SEQ ID NO: 1789 - DNA, 21 bp, synthetic construct
  misc_feature 1..21: note = Description of Artificial Sequence: Synthetic oligonucleotide
  source 1..21: mol_type = other DNA
  modified_base 1: mod_base = OTHER; note = 2'-fluoro nucleotide
  modified_base 2: mod_base = OTHER; note = 2'-fluoro nucleotide
  modified_base 3: mod_base = OTHER; note = 2'-O-Methyl nucleotide
  modified_base 4: mod_base = OTHER; note = 2'-fluoro nucleotide
  modified_base 5: mod_base = OTHER; note = 2'-O-Methyl nucleotide
  modified_base 6: mod_base = OTHER; note = 2'-fluoro nucleotide
  modified_base 7: mod_base = OTHER; note = 2'-O-Methyl nucleotide
  modified_base 8: mod_base = OTHER; note = 2'-fluoro nucleotide
  modified_base 9: mod_base = OTHER; note = 2'-O-Methyl nucleotide
  modified_base 10: mod_base = OTHER; note = 2'-fluoro nucleotide
  modified_base 11: mod_base = OTHER; note = 2'-O-Methyl nucleotide
  modified_base 12: mod_base = OTHER; note = 2'-fluoro nucleotide
  modified_base 13: mod_base = OTHER; note = 2'-O-Methyl nucleotide
  modified_base 14: mod_base = OTHER; note = 2'-fluoro nucleotide
  modified_base 15: mod_base = OTHER; note = 2'-O-Methyl nucleotide
  modified_base 16: mod_base = OTHER; note = 2'-fluoro nucleotide
  modified_base 17: mod_base = OTHER; note = 2'-O-Methyl nucleotide
  modified_base 18: mod_base = OTHER; note = 2'-fluoro nucleotide
  modified_base 19: mod_base = OTHER; note = 2'-O-Methyl nucleotide
  modified_base 20: mod_base = OTHER; note = deoxy-thymine phosphorothioate
  misc_feature 1..19: note = RNA
  misc_feature 20..21: note = DNA
ctcggacgcacgagccgtgtt

SEQ ID NO: 1790 - DNA, 21 bp, synthetic construct
  misc_feature 1..21: note = Description of Artificial Sequence: Synthetic oligonucleotide
  source 1..21: mol_type = other DNA
  modified_base 1: mod_base = OTHER; note = 2'-O-Methyl nucleotide
  modified_base 2: mod_base = OTHER; note = 2'-O-Methyl nucleotide
  modified_base 3: mod_base = OTHER; note = 2'-fluoro nucleotide
  modified_base 4: mod_base = OTHER; note = 2'-O-Methyl nucleotide
  modified_base 5: mod_base = OTHER; note = 2'-fluoro nucleotide
  modified_base 6: mod_base = OTHER; note = 2'-O-Methyl nucleotide
  modified_base 7: mod_base = OTHER; note = 2'-fluoro nucleotide
  modified_base 8: mod_base = OTHER; note = 2'-O-Methyl nucleotide
  modified_base 9: mod_base = OTHER; note = 2'-fluoro nucleotide
  modified_base 10: mod_base = OTHER; note = 2'-O-Methyl nucleotide
  modified_base 11: mod_base = OTHER; note = 2'-fluoro nucleotide
  modified_base 12: mod_base = OTHER; note = 2'-O-Methyl nucleotide
  modified_base 13: mod_base = OTHER; note = 2'-fluoro nucleotide
  modified_base 14: mod_base = OTHER; note = 2'-O-Methyl nucleotide
  modified_base 15: mod_base = OTHER; note = 2'-fluoro nucleotide
  modified_base 16: mod_base = OTHER; note = 2'-O-Methyl nucleotide
  modified_base 17: mod_base = OTHER; note = 2'-fluoro nucleotide
  modified_base 18: mod_base = OTHER; note = 2'-O-Methyl nucleotide
  modified_base 19: mod_base = OTHER; note = 2'-fluoro nucleotide
  modified_base 20: mod_base = OTHER; note = deoxy-thymine phosphorothioate
  misc_feature 1..19: note = RNA
  misc_feature 20..21: note = DNA
acggctcgtgcgtccgagctt

SEQ ID NO: 1791 - DNA, 21 bp, synthetic construct
  misc_feature 1..21: note = Description of Artificial Sequence: Synthetic oligonucleotide
  source 1..21: mol_type = other DNA
  modified_base 1: mod_base = OTHER; note = 2'-fluoro nucleotide
  modified_base 2: mod_base = OTHER; note = 2'-fluoro nucleotide
  modified_base 3: mod_base = OTHER; note = 2'-O-Methyl nucleotide
  modified_base 4: mod_base = OTHER; note = 2'-fluoro nucleotide
  modified_base 5: mod_base = OTHER; note = 2'-O-Methyl nucleotide
  modified_base 6: mod_base = OTHER; note = 2'-fluoro nucleotide
  modified_base 7: mod_base = OTHER; note = 2'-O-Methyl nucleotide
  modified_base 8: mod_base = OTHER; note = 2'-fluoro nucleotide
  modified_base 9: mod_base = OTHER; note = 2'-O-Methyl nucleotide
  modified_base 10: mod_base = OTHER; note = 2'-fluoro nucleotide
  modified_base 11: mod_base = OTHER; note = 2'-O-Methyl nucleotide
  modified_base 12: mod_base = OTHER; note = 2'-fluoro nucleotide
  modified_base 13: mod_base = OTHER; note = 2'-O-Methyl nucleotide
  modified_base 14: mod_base = OTHER; note = 2'-fluoro nucleotide
  modified_base 15: mod_base = OTHER; note = 2'-O-Methyl nucleotide
  modified_base 16: mod_base = OTHER; note = 2'-fluoro nucleotide
  modified_base 17: mod_base = OTHER; note = 2'-O-Methyl nucleotide
  modified_base 18: mod_base = OTHER; note = 2'-fluoro nucleotide
  modified_base 19: mod_base = OTHER; note = 2'-O-Methyl nucleotide
  modified_base 20: mod_base = OTHER; note = deoxy-thymine phosphorothioate
  misc_feature 1..19: note = RNA
  misc_feature 20..21: note = DNA
gctcggacgcacgagccgttt

SEQ ID NO: 1792 - DNA, 21 bp, synthetic construct
  misc_feature 1..21: note = Description of Artificial Sequence: Synthetic oligonucleotide
  source 1..21: mol_type = other DNA
  modified_base 1: mod_base = OTHER; note = 2'-O-Methyl nucleotide
  modified_base 2: mod_base = OTHER; note = 2'-O-Methyl nucleotide
  modified_base 3: mod_base = OTHER; note = 2'-fluoro nucleotide
  modified_base 4: mod_base = OTHER; note = 2'-O-Methyl nucleotide
  modified_base 5: mod_base = OTHER; note = 2'-fluoro nucleotide
  modified_base 6: mod_base = OTHER; note = 2'-O-Methyl nucleotide
  modified_base 7: mod_base = OTHER; note = 2'-fluoro nucleotide
  modified_base 8: mod_base = OTHER; note = 2'-O-Methyl nucleotide
  modified_base 9: mod_base = OTHER; note = 2'-fluoro nucleotide
  modified_base 10: mod_base = OTHER; note = 2'-O-Methyl nucleotide
  modified_base 11: mod_base = OTHER; note = 2'-fluoro nucleotide
  modified_base 12: mod_base = OTHER; note = 2'-O-Methyl nucleotide
  modified_base 13: mod_base = OTHER; note = 2'-fluoro nucleotide
  modified_base 14: mod_base = OTHER; note = 2'-O-Methyl nucleotide
  modified_base 15: mod_base = OTHER; note = 2'-fluoro nucleotide
  modified_base 16: mod_base = OTHER; note = 2'-O-Methyl nucleotide
  modified_base 17: mod_base = OTHER; note = 2'-fluoro nucleotide
  modified_base 18: mod_base = OTHER; note = 2'-O-Methyl nucleotide
  modified_base 19: mod_base = OTHER; note = 2'-fluoro nucleotide
  modified_base 20: mod_base = OTHER; note = deoxy-thymine phosphorothioate
  misc_feature 1..19: note = RNA
  misc_feature 20..21: note = DNA
gctcgtgcgtccgagcctgtt

SEQ ID NO: 1793 - DNA, 21 bp, synthetic construct
  misc_feature 1..21: note = Description of Artificial Sequence: Synthetic oligonucleotide
  source 1..21: mol_type = other DNA
  modified_base 1: mod_base = OTHER; note = 2'-fluoro nucleotide
  modified_base 2: mod_base = OTHER; note = 2'-fluoro nucleotide
  modified_base 3: mod_base = OTHER; note = 2'-O-Methyl nucleotide
  modified_base 4: mod_base = OTHER; note = 2'-fluoro nucleotide
  modified_base 5: mod_base = OTHER; note = 2'-O-Methyl nucleotide
  modified_base 6: mod_base = OTHER; note = 2'-fluoro nucleotide
  modified_base 7: mod_base = OTHER; note = 2'-O-Methyl nucleotide
  modified_base 8: mod_base = OTHER; note = 2'-fluoro nucleotide
  modified_base 9: mod_base = OTHER; note = 2'-O-Methyl nucleotide
  modified_base 10: mod_base = OTHER; note = 2'-fluoro nucleotide
  modified_base 11: mod_base = OTHER; note = 2'-O-Methyl nucleotide
  modified_base 12: mod_base = OTHER; note = 2'-fluoro nucleotide
  modified_base 13: mod_base = OTHER; note = 2'-O-Methyl nucleotide
  modified_base 14: mod_base = OTHER; note = 2'-fluoro nucleotide
  modified_base 15: mod_base = OTHER; note = 2'-O-Methyl nucleotide
  modified_base 16: mod_base = OTHER; note = 2'-fluoro nucleotide
  modified_base 17: mod_base = OTHER; note = 2'-O-Methyl nucleotide
  modified_base 18: mod_base = OTHER; note = 2'-fluoro nucleotide
  modified_base 19: mod_base = OTHER; note = 2'-O-Methyl nucleotide
  modified_base 20: mod_base = OTHER; note = deoxy-thymine phosphorothioate
  misc_feature 1..19: note = RNA
  misc_feature 20..21: note = DNA
caggctcggacgcacgagctt

SEQ ID NO: 1794 - DNA, 21 bp, synthetic construct
  misc_feature 1..21: note = Description of Artificial Sequence: Synthetic oligonucleotide
  source 1..21: mol_type = other DNA
  modified_base 1: mod_base = OTHER; note = 2'-O-Methyl nucleotide
  modified_base 2: mod_base = OTHER; note = 2'-O-Methyl nucleotide
  modified_base 3: mod_base = OTHER; note = 2'-fluoro nucleotide
  modified_base 4: mod_base = OTHER; note = 2'-O-Methyl nucleotide
  modified_base 5: mod_base = OTHER; note = 2'-fluoro nucleotide
  modified_base 6: mod_base = OTHER; note = 2'-O-Methyl nucleotide
  modified_base 7: mod_base = OTHER; note = 2'-fluoro nucleotide
  modified_base 8: mod_base = OTHER; note = 2'-O-Methyl nucleotide
  modified_base 9: mod_base = OTHER; note = 2'-fluoro nucleotide
  modified_base 10: mod_base = OTHER; note = 2'-O-Methyl nucleotide
  modified_base 11: mod_base = OTHER; note = 2'-fluoro nucleotide
  modified_base 12: mod_base = OTHER; note = 2'-O-Methyl nucleotide
  modified_base 13: mod_base = OTHER; note = 2'-fluoro nucleotide
  modified_base 14: mod_base = OTHER; note = 2'-O-Methyl nucleotide
  modified_base 15: mod_base = OTHER; note = 2'-fluoro nucleotide
  modified_base 16: mod_base = OTHER; note = 2'-O-Methyl nucleotide
  modified_base 17: mod_base = OTHER; note = 2'-fluoro nucleotide
  modified_base 18: mod_base = OTHER; note = 2'-O-Methyl nucleotide
  modified_base 19: mod_base = OTHER; note = 2'-fluoro nucleotide
  modified_base 20: mod_base = OTHER; note = deoxy-thymine phosphorothioate
  misc_feature 1..19: note = RNA
  misc_feature 20..21: note = DNA
ggaggaagacggcgtccgctt

SEQ ID NO: 1795 - DNA, 21 bp, synthetic construct
  misc_feature 1..21: note = Description of Artificial Sequence: Synthetic oligonucleotide
  source 1..21: mol_type = other DNA
  modified_base 1: mod_base = OTHER; note = 2'-fluoro nucleotide
  modified_base 2: mod_base = OTHER; note = 2'-fluoro nucleotide
  modified_base 3: mod_base = OTHER; note = 2'-O-Methyl nucleotide
  modified_base 4: mod_base = OTHER; note = 2'-fluoro nucleotide
  modified_base 5: mod_base = OTHER; note = 2'-O-Methyl nucleotide
  modified_base 6: mod_base = OTHER; note = 2'-fluoro nucleotide
  modified_base 7: mod_base = OTHER; note = 2'-O-Methyl nucleotide
  modified_base 8: mod_base = OTHER; note = 2'-fluoro nucleotide
  modified_base 9: mod_base = OTHER; note = 2'-O-Methyl nucleotide
  modified_base 10: mod_base = OTHER; note = 2'-fluoro nucleotide
  modified_base 11: mod_base = OTHER; note = 2'-O-Methyl nucleotide
  modified_base 12: mod_base = OTHER; note = 2'-fluoro nucleotide
  modified_base 13: mod_base = OTHER; note = 2'-O-Methyl nucleotide
  modified_base 14: mod_base = OTHER; note = 2'-fluoro nucleotide
  modified_base 15: mod_base = OTHER; note = 2'-O-Methyl nucleotide
  modified_base 16: mod_base = OTHER; note = 2'-fluoro nucleotide
  modified_base 17: mod_base = OTHER; note = 2'-O-Methyl nucleotide
  modified_base 18: mod_base = OTHER; note = 2'-fluoro nucleotide
  modified_base 19: mod_base = OTHER; note = 2'-O-Methyl nucleotide
  modified_base 20: mod_base = OTHER; note = deoxy-thymine phosphorothioate
  misc_feature 1..19: note = RNA
  misc_feature 20..21: note = DNA
gcggacgccgtcttcctcctt

SEQ ID NO: 1796 - DNA, 21 bp, synthetic construct
  misc_feature 1..21: note = Description of Artificial Sequence: Synthetic oligonucleotide
  source 1..21: mol_type = other DNA
  modified_base 1: mod_base = OTHER; note = 2'-O-Methyl nucleotide
  modified_base 2: mod_base = OTHER; note = 2'-O-Methyl nucleotide
  modified_base 3: mod_base = OTHER; note = 2'-fluoro nucleotide
  modified_base 4: mod_base = OTHER; note = 2'-O-Methyl nucleotide
  modified_base 5: mod_base = OTHER; note = 2'-fluoro nucleotide
  modified_base 6: mod_base = OTHER; note = 2'-O-Methyl nucleotide
  modified_base 7: mod_base = OTHER; note = 2'-fluoro nucleotide
  modified_base 8: mod_base = OTHER; note = 2'-O-Methyl nucleotide
  modified_base 9: mod_base = OTHER; note = 2'-fluoro nucleotide
  modified_base 10: mod_base = OTHER; note = 2'-O-Methyl nucleotide
  modified_base 11: mod_base = OTHER; note = 2'-fluoro nucleotide
  modified_base 12: mod_base = OTHER; note = 2'-O-Methyl nucleotide
  modified_base 13: mod_base = OTHER; note = 2'-fluoro nucleotide
  modified_base 14: mod_base = OTHER; note = 2'-O-Methyl nucleotide
  modified_base 15: mod_base = OTHER; note = 2'-fluoro nucleotide
  modified_base 16: mod_base = OTHER; note = 2'-O-Methyl nucleotide
  modified_base 17: mod_base = OTHER; note = 2'-fluoro nucleotide
  modified_base 18: mod_base = OTHER; note = 2'-O-Methyl nucleotide
  modified_base 19: mod_base = OTHER; note = 2'-fluoro nucleotide
  modified_base 20: mod_base = OTHER; note = deoxy-thymine phosphorothioate
  misc_feature 1..19: note = RNA
  misc_feature 20..21: note = DNA
gaggaagacggcgtccgcatt

SEQ ID NO: 1797 - DNA, 21 bp, synthetic construct
  misc_feature 1..21: note = Description of Artificial Sequence: Synthetic oligonucleotide
  source 1..21: mol_type = other DNA
  modified_base 1: mod_base = OTHER; note = 2'-fluoro nucleotide
  modified_base 2: mod_base = OTHER; note = 2'-fluoro nucleotide
  modified_base 3: mod_base = OTHER; note = 2'-O-Methyl nucleotide
  modified_base 4: mod_base = OTHER; note = 2'-fluoro nucleotide
  modified_base 5: mod_base = OTHER; note = 2'-O-Methyl nucleotide
  modified_base 6: mod_base = OTHER; note = 2'-fluoro nucleotide
  modified_base 7: mod_base = OTHER; note = 2'-O-Methyl nucleotide
  modified_base 8: mod_base = OTHER; note = 2'-fluoro nucleotide
  modified_base 9: mod_base = OTHER; note = 2'-O-Methyl nucleotide
  modified_base 10: mod_base = OTHER; note = 2'-fluoro nucleotide
  modified_base 11: mod_base = OTHER; note = 2'-O-Methyl nucleotide
  modified_base 12: mod_base = OTHER; note = 2'-fluoro nucleotide
  modified_base 13: mod_base = OTHER; note = 2'-O-Methyl nucleotide
  modified_base 14: mod_base = OTHER; note = 2'-fluoro nucleotide
  modified_base 15: mod_base = OTHER; note = 2'-O-Methyl nucleotide
  modified_base 16: mod_base = OTHER; note = 2'-fluoro nucleotide
  modified_base 17: mod_base = OTHER; note = 2'-O-Methyl nucleotide
  modified_base 18: mod_base = OTHER; note = 2'-fluoro nucleotide
  modified_base 19: mod_base = OTHER; note = 2'-O-Methyl nucleotide
  modified_base 20: mod_base = OTHER; note = deoxy-thymine phosphorothioate
  misc_feature 1..19: note = RNA
  misc_feature 20..21: note = DNA
tgcggacgccgtcttcctctt

SEQ ID NO: 1798 - DNA, 21 bp, synthetic construct
  misc_feature 1..21: note = Description of Artificial Sequence: Synthetic oligonucleotide
  source 1..21: mol_type = other DNA
  modified_base 1: mod_base = OTHER; note = 2'-O-Methyl nucleotide
  modified_base 2: mod_base = OTHER; note = 2'-O-Methyl nucleotide
  modified_base 3: mod_base = OTHER; note = 2'-fluoro nucleotide
  modified_base 4: mod_base = OTHER; note = 2'-O-Methyl nucleotide
  modified_base 5: mod_base = OTHER; note = 2'-fluoro nucleotide
  modified_base 6: mod_base = OTHER; note = 2'-O-Methyl nucleotide
  modified_base 7: mod_base = OTHER; note = 2'-fluoro nucleotide
  modified_base 8: mod_base = OTHER; note = 2'-O-Methyl nucleotide
  modified_base 9: mod_base = OTHER; note = 2'-fluoro nucleotide
  modified_base 10: mod_base = OTHER; note = 2'-O-Methyl nucleotide
  modified_base 11: mod_base = OTHER; note = 2'-fluoro nucleotide
  modified_base 12: mod_base = OTHER; note = 2'-O-Methyl nucleotide
  modified_base 13: mod_base = OTHER; note = 2'-fluoro nucleotide
  modified_base 14: mod_base = OTHER; note = 2'-O-Methyl nucleotide
  modified_base 15: mod_base = OTHER; note = 2'-fluoro nucleotide
  modified_base 16: mod_base = OTHER; note = 2'-O-Methyl nucleotide
  modified_base 17: mod_base = OTHER; note = 2'-fluoro nucleotide
  modified_base 18: mod_base = OTHER; note = 2'-O-Methyl nucleotide
  modified_base 19: mod_base = OTHER; note = 2'-fluoro nucleotide
  modified_base 20: mod_base = OTHER; note = deoxy-thymine phosphorothioate
  misc_feature 1..19: note = RNA
  misc_feature 20..21: note = DNA
ggaagacggcgtccgcaagtt

SEQ ID NO: 1799 - DNA, 21 bp, synthetic construct
  misc_feature 1..21: note = Description of Artificial Sequence: Synthetic oligonucleotide
  source 1..21: mol_type = other DNA
  modified_base 1: mod_base = OTHER; note = 2'-fluoro nucleotide
  modified_base 2: mod_base = OTHER; note = 2'-fluoro nucleotide
  modified_base 3: mod_base = OTHER; note = 2'-O-Methyl nucleotide
  modified_base 4: mod_base = OTHER; note = 2'-fluoro nucleotide
  modified_base 5: mod_base = OTHER; note = 2'-O-Methyl nucleotide
  modified_base 6: mod_base = OTHER; note = 2'-fluoro nucleotide
  modified_base 7: mod_base = OTHER; note = 2'-O-Methyl nucleotide
  modified_base 8: mod_base = OTHER; note = 2'-fluoro nucleotide
  modified_base 9: mod_base = OTHER; note = 2'-O-Methyl nucleotide
  modified_base 10: mod_base = OTHER; note = 2'-fluoro nucleotide
  modified_base 11: mod_base = OTHER; note = 2'-O-Methyl nucleotide
  modified_base 12: mod_base = OTHER; note = 2'-fluoro nucleotide
  modified_base 13: mod_base = OTHER; note = 2'-O-Methyl nucleotide
  modified_base 14: mod_base = OTHER; note = 2'-fluoro nucleotide
  modified_base 15: mod_base = OTHER; note = 2'-O-Methyl nucleotide
  modified_base 16: mod_base = OTHER; note = 2'-fluoro nucleotide
  modified_base 17: mod_base = OTHER; note = 2'-O-Methyl nucleotide
  modified_base 18: mod_base = OTHER; note = 2'-fluoro nucleotide
  modified_base 19: mod_base = OTHER; note = 2'-O-Methyl nucleotide
  modified_base 20: mod_base = OTHER; note = deoxy-thymine phosphorothioate
  misc_feature 1..19: note = RNA
  misc_feature 20..21: note = DNA
cttgcggacgccgtcttcctt

SEQ ID NO: 1800 - DNA, 21 bp, synthetic construct
  misc_feature 1..21: note = Description of Artificial Sequence: Synthetic oligonucleotide
  source 1..21: mol_type = other DNA
  modified_base 1: mod_base = OTHER; note = 2'-O-Methyl nucleotide
  modified_base 2: mod_base = OTHER; note = 2'-O-Methyl nucleotide
  modified_base 3: mod_base = OTHER; note = 2'-fluoro nucleotide
  modified_base 4: mod_base = OTHER; note = 2'-O-Methyl nucleotide
  modified_base 5: mod_base = OTHER; note = 2'-fluoro nucleotide
  modified_base 6: mod_base = OTHER; note = 2'-O-Methyl nucleotide
  modified_base 7: mod_base = OTHER; note = 2'-fluoro nucleotide
  modified_base 8: mod_base = OTHER; note = 2'-O-Methyl nucleotide
  modified_base 9: mod_base = OTHER; note = 2'-fluoro nucleotide
  modified_base 10: mod_base = OTHER; note = 2'-O-Methyl nucleotide
  modified_base 11: mod_base = OTHER; note = 2'-fluoro nucleotide
  modified_base 12: mod_base = OTHER; note = 2'-O-Methyl nucleotide
  modified_base 13: mod_base = OTHER; note = 2'-fluoro nucleotide
  modified_base 14: mod_base = OTHER; note = 2'-O-Methyl nucleotide
  modified_base 15: mod_base = OTHER; note = 2'-fluoro nucleotide
  modified_base 16: mod_base = OTHER; note = 2'-O-Methyl nucleotide
  modified_base 17: mod_base = OTHER; note = 2'-fluoro nucleotide
  modified_base 18: mod_base = OTHER; note = 2'-O-Methyl nucleotide
  modified_base 19: mod_base = OTHER; note = 2'-fluoro nucleotide
  modified_base 20: mod_base = OTHER; note = deoxy-thymine phosphorothioate
  misc_feature 1..19: note = RNA
  misc_feature 20..21: note = DNA
gaagacggcgtccgcaagttt

SEQ ID NO: 1801 - DNA, 21 bp, synthetic construct
  misc_feature 1..21: note = Description of Artificial Sequence: Synthetic oligonucleotide
  source 1..21: mol_type = other DNA
  modified_base 1: mod_base = OTHER; note = 2'-fluoro nucleotide
  modified_base 2: mod_base = OTHER; note = 2'-fluoro nucleotide
  modified_base 3: mod_base = OTHER; note = 2'-O-Methyl nucleotide
  modified_base 4: mod_base = OTHER; note = 2'-fluoro nucleotide
  modified_base 5: mod_base = OTHER; note = 2'-O-Methyl nucleotide
  modified_base 6: mod_base = OTHER; note = 2'-fluoro nucleotide
  modified_base 7: mod_base = OTHER; note = 2'-O-Methyl nucleotide
  modified_base 8: mod_base = OTHER; note = 2'-fluoro nucleotide
  modified_base 9: mod_base = OTHER; note = 2'-O-Methyl nucleotide
  modified_base 10: mod_base = OTHER; note = 2'-fluoro nucleotide
  modified_base 11: mod_base = OTHER; note = 2'-O-Methyl nucleotide
  modified_base 12: mod_base = OTHER; note = 2'-fluoro nucleotide
  modified_base 13: mod_base = OTHER; note = 2'-O-Methyl nucleotide
  modified_base 14: mod_base = OTHER; note = 2'-fluoro nucleotide
  modified_base 15: mod_base = OTHER; note = 2'-O-Methyl nucleotide
  modified_base 16: mod_base = OTHER; note = 2'-fluoro nucleotide
  modified_base 17: mod_base = OTHER; note = 2'-O-Methyl nucleotide
  modified_base 18: mod_base = OTHER; note = 2'-fluoro nucleotide
  modified_base 19: mod_base = OTHER; note = 2'-O-Methyl nucleotide
  modified_base 20: mod_base = OTHER; note = deoxy-thymine phosphorothioate
  misc_feature 1..19: note = RNA
  misc_feature 20..21: note = DNA
acttgcggacgccgtcttctt

SEQ ID NO: 1802 - DNA, 21 bp, synthetic construct
  misc_feature 1..21: note = Description of Artificial Sequence: Synthetic oligonucleotide
  source 1..21: mol_type = other DNA
  modified_base 1: mod_base = OTHER; note = 2'-O-Methyl nucleotide
  modified_base 2: mod_base = OTHER; note = 2'-O-Methyl nucleotide
  modified_base 3: mod_base = OTHER; note = 2'-fluoro nucleotide
  modified_base 4: mod_base = OTHER; note = 2'-O-Methyl nucleotide
  modified_base 5: mod_base = OTHER; note = 2'-fluoro nucleotide
  modified_base 6: mod_base = OTHER; note = 2'-O-Methyl nucleotide
  modified_base 7: mod_base = OTHER; note = 2'-fluoro nucleotide
  modified_base 8: mod_base = OTHER; note = 2'-O-Methyl nucleotide
  modified_base 9: mod_base = OTHER; note = 2'-fluoro nucleotide
  modified_base 10: mod_base = OTHER; note = 2'-O-Methyl nucleotide
  modified_base 11: mod_base = OTHER; note = 2'-fluoro nucleotide
  modified_base 12: mod_base = OTHER; note = 2'-O-Methyl nucleotide
  modified_base 13: mod_base = OTHER; note = 2'-fluoro nucleotide
  modified_base 14: mod_base = OTHER; note = 2'-O-Methyl nucleotide
  modified_base 15: mod_base = OTHER; note = 2'-fluoro nucleotide
  modified_base 16: mod_base = OTHER; note = 2'-O-Methyl nucleotide
  modified_base 17: mod_base = OTHER; note = 2'-fluoro nucleotide
  modified_base 18: mod_base = OTHER; note = 2'-O-Methyl nucleotide
  modified_base 19: mod_base = OTHER; note = 2'-fluoro nucleotide
  modified_base 20: mod_base = OTHER; note = deoxy-thymine phosphorothioate
  misc_feature 1..19: note = RNA
  misc_feature 20..21: note = DNA
aagacggcgtccgcaagtgtt

SEQ ID NO: 1803 - DNA, 21 bp, synthetic construct
  misc_feature 1..21: note = Description of Artificial Sequence: Synthetic oligonucleotide
  source 1..21: mol_type = other DNA
  modified_base 1: mod_base = OTHER; note = 2'-fluoro nucleotide
  modified_base 2: mod_base = OTHER; note = 2'-fluoro nucleotide
  modified_base 3: mod_base = OTHER; note = 2'-O-Methyl nucleotide
  modified_base 4: mod_base = OTHER; note = 2'-fluoro nucleotide
  modified_base 5: mod_base = OTHER; note = 2'-O-Methyl nucleotide
  modified_base 6: mod_base = OTHER; note = 2'-fluoro nucleotide
  modified_base 7: mod_base = OTHER; note = 2'-O-Methyl nucleotide
  modified_base 8: mod_base = OTHER; note = 2'-fluoro nucleotide
  modified_base 9: mod_base = OTHER; note = 2'-O-Methyl nucleotide
  modified_base 10: mod_base = OTHER; note = 2'-fluoro nucleotide
  modified_base 11: mod_base = OTHER; note = 2'-O-Methyl nucleotide
  modified_base 12: mod_base = OTHER; note = 2'-fluoro nucleotide
  modified_base 13: mod_base = OTHER; note = 2'-O-Methyl nucleotide
  modified_base 14: mod_base = OTHER; note = 2'-fluoro nucleotide
  modified_base 15: mod_base = OTHER; note = 2'-O-Methyl nucleotide
  modified_base 16: mod_base = OTHER; note = 2'-fluoro nucleotide
  modified_base 17: mod_base = OTHER; note = 2'-O-Methyl nucleotide
  modified_base 18: mod_base = OTHER; note = 2'-fluoro nucleotide
  modified_base 19: mod_base = OTHER; note = 2'-O-Methyl nucleotide
  modified_base 20: mod_base = OTHER; note = deoxy-thymine phosphorothioate
  misc_feature 1..19: note = RNA
  misc_feature 20..21: note = DNA
cacttgcggacgccgtctttt

SEQ ID NO: 1804 - DNA, 21 bp, synthetic construct
  misc_feature 1..21: note = Description of Artificial Sequence: Synthetic oligonucleotide
  source 1..21: mol_type = other DNA
  modified_base 1: mod_base = OTHER; note = 2'-O-Methyl nucleotide
  modified_base 2: mod_base = OTHER; note = 2'-O-Methyl nucleotide
  modified_base 3: mod_base = OTHER; note = 2'-fluoro nucleotide
  modified_base 4: mod_base = OTHER; note = 2'-O-Methyl nucleotide
  modified_base 5: mod_base = OTHER; note = 2'-fluoro nucleotide
  modified_base 6: mod_base = OTHER; note = 2'-O-Methyl nucleotide
  modified_base 7: mod_base = OTHER; note = 2'-fluoro nucleotide
  modified_base 8: mod_base = OTHER; note = 2'-O-Methyl nucleotide
  modified_base 9: mod_base = OTHER; note = 2'-fluoro nucleotide
  modified_base 10: mod_base = OTHER; note = 2'-O-Methyl nucleotide
  modified_base 11: mod_base = OTHER; note = 2'-fluoro nucleotide
  modified_base 12: mod_base = OTHER; note = 2'-O-Methyl nucleotide
  modified_base 13: mod_base = OTHER; note = 2'-fluoro nucleotide
  modified_base 14: mod_base = OTHER; note = 2'-O-Methyl nucleotide
  modified_base 15: mod_base = OTHER; note = 2'-fluoro nucleotide
  modified_base 16: mod_base = OTHER; note = 2'-O-Methyl nucleotide
  modified_base 17: mod_base = OTHER; note = 2'-fluoro nucleotide
  modified_base 18: mod_base = OTHER; note = 2'-O-Methyl nucleotide
  modified_base 19: mod_base = OTHER; note = 2'-fluoro nucleotide
  modified_base 20: mod_base = OTHER; note = deoxy-thymine phosphorothioate
  misc_feature 1..19: note = RNA
  misc_feature 20..21: note = DNA
gacggcgtccgcaagtgtatt

SEQ ID NO: 1805 - DNA, 21 bp, synthetic construct
  misc_feature 1..21: note = Description of Artificial Sequence: Synthetic oligonucleotide
  source 1..21: mol_type = other DNA
  modified_base 1: mod_base = OTHER; note = 2'-fluoro nucleotide
  modified_base 2: mod_base = OTHER; note = 2'-fluoro nucleotide
  modified_base 3: mod_base = OTHER; note = 2'-O-Methyl nucleotide
  modified_base 4: mod_base = OTHER; note = 2'-fluoro nucleotide
  modified_base 5: mod_base = OTHER; note = 2'-O-Methyl nucleotide
  modified_base 6: mod_base = OTHER; note = 2'-fluoro nucleotide
  modified_base 7: mod_base = OTHER; note = 2'-O-Methyl nucleotide
  modified_base 8: mod_base = OTHER; note = 2'-fluoro nucleotide
  modified_base 9: mod_base = OTHER; note = 2'-O-Methyl nucleotide
  modified_base 10: mod_base = OTHER; note = 2'-fluoro nucleotide
  modified_base 11: mod_base = OTHER; note = 2'-O-Methyl nucleotide
  modified_base 12: mod_base = OTHER; note = 2'-fluoro nucleotide
  modified_base 13: mod_base = OTHER; note = 2'-O-Methyl nucleotide
  modified_base 14: mod_base = OTHER; note = 2'-fluoro nucleotide
  modified_base 15: mod_base = OTHER; note = 2'-O-Methyl nucleotide
  modified_base 16: mod_base = OTHER; note = 2'-fluoro nucleotide
  modified_base 17: mod_base = OTHER; note = 2'-O-Methyl nucleotide
  modified_base 18: mod_base = OTHER; note = 2'-fluoro nucleotide
  modified_base 19: mod_base = OTHER; note = 2'-O-Methyl nucleotide
  modified_base 20: mod_base = OTHER; note = deoxy-thymine phosphorothioate
  misc_feature 1..19: note = RNA
  misc_feature 20..21: note = DNA
tacacttgcggacgccgtctt

SEQ ID NO: 1806 - DNA, 21 bp, synthetic construct
  misc_feature 1..21: note = Description of Artificial Sequence: Synthetic oligonucleotide
  source 1..21: mol_type = other DNA
  modified_base 1: mod_base = OTHER; note = 2'-O-Methyl nucleotide
  modified_base 2: mod_base = OTHER; note = 2'-O-Methyl nucleotide
  modified_base 3: mod_base = OTHER; note = 2'-fluoro nucleotide
  modified_base 4: mod_base = OTHER; note = 2'-O-Methyl nucleotide
  modified_base 5: mod_base = OTHER; note = 2'-fluoro nucleotide
  modified_base 6: mod_base = OTHER; note = 2'-O-Methyl nucleotide
  modified_base 7: mod_base = OTHER; note = 2'-fluoro nucleotide
  modified_base 8: mod_base = OTHER; note = 2'-O-Methyl nucleotide
  modified_base 9: mod_base = OTHER; note = 2'-fluoro nucleotide
  modified_base 10: mod_base = OTHER; note = 2'-O-Methyl nucleotide
  modified_base 11: mod_base = OTHER; note = 2'-fluoro nucleotide
  modified_base 12: mod_base = OTHER; note = 2'-O-Methyl nucleotide
  modified_base 13: mod_base = OTHER; note = 2'-fluoro nucleotide
  modified_base 14: mod_base = OTHER; note = 2'-O-Methyl nucleotide
  modified_base 15: mod_base = OTHER; note = 2'-fluoro nucleotide
  modified_base 16: mod_base = OTHER; note = 2'-O-Methyl nucleotide
  modified_base 17: mod_base = OTHER; note = 2'-fluoro nucleotide
  modified_base 18: mod_base = OTHER; note = 2'-O-Methyl nucleotide
  modified_base 19: mod_base = OTHER; note = 2'-fluoro nucleotide
  modified_base 20: mod_base = OTHER; note = deoxy-thymine phosphorothioate
  misc_feature 1..19: note = RNA
  misc_feature 20..21: note = DNA
acggcgtccgcaagtgtaatt

SEQ ID NO: 1807 - DNA, 21 bp, synthetic construct
  misc_feature 1..21: note = Description of Artificial Sequence: Synthetic oligonucleotide
  source 1..21: mol_type = other DNA
  modified_base 1: mod_base = OTHER; note = 2'-fluoro nucleotide
  modified_base 2: mod_base = OTHER; note = 2'-fluoro nucleotide
  modified_base 3: mod_base = OTHER; note = 2'-O-Methyl nucleotide
  modified_base 4: mod_base = OTHER; note = 2'-fluoro nucleotide
  modified_base 5: mod_base = OTHER; note = 2'-O-Methyl nucleotide
  modified_base 6: mod_base = OTHER; note = 2'-fluoro nucleotide
  modified_base 7: mod_base = OTHER; note = 2'-O-Methyl nucleotide
  modified_base 8: mod_base = OTHER; note = 2'-fluoro nucleotide
  modified_base 9: mod_base = OTHER; note = 2'-O-Methyl nucleotide
  modified_base 10: mod_base = OTHER; note = 2'-fluoro nucleotide
  modified_base 11: mod_base = OTHER; note = 2'-O-Methyl nucleotide
  modified_base 12: mod_base = OTHER; note = 2'-fluoro nucleotide
  modified_base 13: mod_base = OTHER; note = 2'-O-Methyl nucleotide
  modified_base 14: mod_base = OTHER; note = 2'-fluoro nucleotide
  modified_base 15: mod_base = OTHER; note = 2'-O-Methyl nucleotide
  modified_base 16: mod_base = OTHER; note = 2'-fluoro nucleotide
  modified_base 17: mod_base = OTHER; note = 2'-O-Methyl nucleotide
  modified_base 18: mod_base = OTHER; note = 2'-fluoro nucleotide
  modified_base 19: mod_base = OTHER; note = 2'-O-Methyl nucleotide
  modified_base 20: mod_base = OTHER; note = deoxy-thymine phosphorothioate
  misc_feature 1..19: note = RNA
  misc_feature 20..21: note = DNA
ttacacttgcggacgccgttt

SEQ ID NO: 1808 - DNA, 21 bp, synthetic construct
  misc_feature 1..21: note = Description of Artificial Sequence: Synthetic oligonucleotide
  source 1..21: mol_type = other DNA
  modified_base 1: mod_base = OTHER; note = 2'-O-Methyl nucleotide
  modified_base 2: mod_base = OTHER; note = 2'-O-Methyl nucleotide
  modified_base 3: mod_base = OTHER; note = 2'-fluoro nucleotide
  modified_base 4: mod_base = OTHER; note = 2'-O-Methyl nucleotide
  modified_base 5: mod_base = OTHER; note = 2'-fluoro nucleotide
  modified_base 6: mod_base = OTHER; note = 2'-O-Methyl nucleotide
  modified_base 7: mod_base = OTHER; note = 2'-fluoro nucleotide
  modified_base 8: mod_base = OTHER; note = 2'-O-Methyl nucleotide
  modified_base 9: mod_base = OTHER; note = 2'-fluoro nucleotide
  modified_base 10: mod_base = OTHER; note = 2'-O-Methyl nucleotide
  modified_base 11: mod_base = OTHER; note = 2'-fluoro nucleotide
  modified_base 12: mod_base = OTHER; note = 2'-O-Methyl nucleotide
  modified_base 13: mod_base = OTHER; note = 2'-fluoro nucleotide
  modified_base 14: mod_base = OTHER; note = 2'-O-Methyl nucleotide
  modified_base 15: mod_base = OTHER; note = 2'-fluoro nucleotide
  modified_base 16: mod_base = OTHER; note = 2'-O-Methyl nucleotide
  modified_base 17: mod_base = OTHER; note = 2'-fluoro nucleotide
  modified_base 18: mod_base = OTHER; note = 2'-O-Methyl nucleotide
  modified_base 19: mod_base = OTHER; note = 2'-fluoro nucleotide
  modified_base 20: mod_base = OTHER; note = deoxy-thymine phosphorothioate
  misc_feature 1..19: note = RNA
  misc_feature 20..21: note = DNA
gcgtccgcaagtgtaagaatt

SEQ ID NO: 1809 - DNA, 21 bp, synthetic construct
  misc_feature 1..21: note = Description of Artificial Sequence: Synthetic oligonucleotide
  source 1..21: mol_type = other DNA
  modified_base 1: mod_base = OTHER; note = 2'-fluoro nucleotide
  modified_base 2: mod_base = OTHER; note = 2'-fluoro nucleotide
  modified_base 3: mod_base = OTHER; note = 2'-O-Methyl nucleotide
  modified_base 4: mod_base = OTHER; note = 2'-fluoro nucleotide
  modified_base 5: mod_base = OTHER; note = 2'-O-Methyl nucleotide
  modified_base 6: mod_base = OTHER; note = 2'-fluoro nucleotide
  modified_base 7: mod_base = OTHER; note = 2'-O-Methyl nucleotide
  modified_base 8: mod_base = OTHER; note = 2'-fluoro nucleotide
  modified_base 9: mod_base = OTHER; note = 2'-O-Methyl nucleotide
  modified_base 10: mod_base = OTHER; note = 2'-fluoro nucleotide
  modified_base 11: mod_base = OTHER; note = 2'-O-Methyl nucleotide
  modified_base 12: mod_base = OTHER; note = 2'-fluoro nucleotide
  modified_base 13: mod_base = OTHER; note = 2'-O-Methyl nucleotide
  modified_base 14: mod_base = OTHER; note = 2'-fluoro nucleotide
  modified_base 15: mod_base = OTHER; note = 2'-O-Methyl nucleotide
  modified_base 16: mod_base = OTHER; note = 2'-fluoro nucleotide
  modified_base 17: mod_base = OTHER; note = 2'-O-Methyl nucleotide
  modified_base 18: mod_base = OTHER; note = 2'-fluoro nucleotide
  modified_base 19: mod_base = OTHER; note = 2'-O-Methyl nucleotide
  modified_base 20: mod_base = OTHER; note = deoxy-thymine phosphorothioate
  misc_feature 1..19: note = RNA
  misc_feature 20..21: note = DNA
ttcttacacttgcggacgctt

SEQ ID NO: 1810 - DNA, 21 bp, synthetic construct
  misc_feature 1..21: note = Description of Artificial Sequence: Synthetic oligonucleotide
  source 1..21: mol_type = other DNA
  modified_base 1: mod_base = OTHER; note = 2'-O-Methyl nucleotide
  modified_base 2: mod_base = OTHER; note = 2'-O-Methyl nucleotide
  modified_base 3: mod_base = OTHER; note = 2'-fluoro nucleotide
  modified_base 4: mod_base = OTHER; note = 2'-O-Methyl nucleotide
  modified_base 5: mod_base = OTHER; note = 2'-fluoro nucleotide
  modified_base 6: mod_base = OTHER; note = 2'-O-Methyl nucleotide
  modified_base 7: mod_base = OTHER; note = 2'-fluoro nucleotide
  modified_base 8: mod_base = OTHER; note = 2'-O-Methyl nucleotide
  modified_base 9: mod_base = OTHER; note = 2'-fluoro nucleotide
  modified_base 10: mod_base = OTHER; note = 2'-O-Methyl nucleotide
  modified_base 11: mod_base = OTHER; note = 2'-fluoro nucleotide
  modified_base 12: mod_base = OTHER; note = 2'-O-Methyl nucleotide
  modified_base 13: mod_base = OTHER; note = 2'-fluoro nucleotide
  modified_base 14: mod_base = OTHER; note = 2'-O-Methyl nucleotide
  modified_base 15: mod_base = OTHER; note = 2'-fluoro nucleotide
  modified_base 16: mod_base = OTHER; note = 2'-O-Methyl nucleotide
  modified_base 17: mod_base = OTHER; note = 2'-fluoro nucleotide
  modified_base 18: mod_base = OTHER; note = 2'-O-Methyl nucleotide
  modified_base 19: mod_base = OTHER; note = 2'-fluoro nucleotide
  modified_base 20: mod_base = OTHER; note = deoxy-thymine phosphorothioate
  misc_feature 1..19: note = RNA
  misc_feature 20..21: note = DNA
cgtccgcaagtgtaagaagtt

SEQ ID NO: 1811 - DNA, 21 bp, synthetic construct
  misc_feature 1..21: note = Description of Artificial Sequence: Synthetic oligonucleotide
  source 1..21: mol_type = other DNA
  modified_base 1: mod_base = OTHER; note = 2'-fluoro nucleotide
  modified_base 2: mod_base = OTHER; note = 2'-fluoro nucleotide
  modified_base 3: mod_base = OTHER; note = 2'-O-Methyl nucleotide
  modified_base 4: mod_base = OTHER; note = 2'-fluoro nucleotide
  modified_base 5: mod_base = OTHER; note = 2'-O-Methyl nucleotide
  modified_base 6: mod_base = OTHER; note = 2'-fluoro nucleotide
  modified_base 7: mod_base = OTHER; note = 2'-O-Methyl nucleotide
  modified_base 8: mod_base = OTHER; note = 2'-fluoro nucleotide
  modified_base 9: mod_base = OTHER; note = 2'-O-Methyl nucleotide
  modified_base 10: mod_base = OTHER; note = 2'-fluoro nucleotide
  modified_base 11: mod_base = OTHER; note = 2'-O-Methyl nucleotide
  modified_base 12: mod_base = OTHER; note = 2'-fluoro nucleotide
  modified_base 13: mod_base = OTHER; note = 2'-O-Methyl nucleotide
  modified_base 14: mod_base = OTHER; note = 2'-fluoro nucleotide
  modified_base 15: mod_base = OTHER; note = 2'-O-Methyl nucleotide
  modified_base 16: mod_base = OTHER; note = 2'-fluoro nucleotide
  modified_base 17: mod_base = OTHER; note = 2'-O-Methyl nucleotide
  modified_base 18: mod_base = OTHER; note = 2'-fluoro nucleotide
  modified_base 19: mod_base = OTHER; note = 2'-O-Methyl nucleotide
  modified_base 20: mod_base = OTHER; note = deoxy-thymine phosphorothioate
  misc_feature 1..19: note = RNA
  misc_feature 20..21: note = DNA
cttcttacacttgcggacgtt

SEQ ID NO: 1812 - DNA, 21 bp, synthetic construct
  misc_feature 1..21: note = Description of Artificial Sequence: Synthetic oligonucleotide
  source 1..21: mol_type = other DNA
  modified_base 1: mod_base = OTHER; note = 2'-O-Methyl nucleotide
  modified_base 2: mod_base = OTHER; note = 2'-O-Methyl nucleotide
  modified_base 3: mod_base = OTHER; note = 2'-fluoro nucleotide
  modified_base 4: mod_base = OTHER; note = 2'-O-Methyl nucleotide
  modified_base 5: mod_base = OTHER; note = 2'-fluoro nucleotide
  modified_base 6: mod_base = OTHER; note = 2'-O-Methyl nucleotide
  modified_base 7: mod_base = OTHER; note = 2'-fluoro nucleotide
  modified_base 8: mod_base = OTHER; note = 2'-O-Methyl nucleotide
  modified_base 9: mod_base = OTHER; note = 2'-fluoro nucleotide
  modified_base 10: mod_base = OTHER; note = 2'-O-Methyl nucleotide
  modified_base 11: mod_base = OTHER; note = 2'-fluoro nucleotide
  modified_base 12: mod_base = OTHER; note = 2'-O-Methyl nucleotide
  modified_base 13: mod_base = OTHER; note = 2'-fluoro nucleotide
  modified_base 14: mod_base = OTHER; note = 2'-O-Methyl nucleotide
  modified_base 15: mod_base = OTHER; note = 2'-fluoro nucleotide
  modified_base 16: mod_base = OTHER; note = 2'-O-Methyl nucleotide
  modified_base 17: mod_base = OTHER; note = 2'-fluoro nucleotide
  modified_base 18: mod_base = OTHER; note = 2'-O-Methyl nucleotide
  modified_base 19: mod_base = OTHER; note = 2'-fluoro nucleotide
  modified_base 20: mod_base = OTHER; note = deoxy-thymine phosphorothioate
  misc_feature 1..19: note = RNA
  misc_feature 20..21: note = DNA
gtccgcaagtgtaagaagttt

SEQ ID NO: 1813 - DNA, 21 bp, synthetic construct
  misc_feature 1..21: note = Description of Artificial Sequence: Synthetic oligonucleotide
  source 1..21: mol_type = other DNA
  modified_base 1: mod_base = OTHER; note = 2'-fluoro nucleotide
  modified_base 2: mod_base = OTHER; note = 2'-fluoro nucleotide
  modified_base 3: mod_base = OTHER; note = 2'-O-Methyl nucleotide
  modified_base 4: mod_base = OTHER; note = 2'-fluoro nucleotide
  modified_base 5: mod_base = OTHER; note = 2'-O-Methyl nucleotide
  modified_base 6: mod_base = OTHER; note = 2'-fluoro nucleotide
  modified_base 7: mod_base = OTHER; note = 2'-O-Methyl nucleotide
  modified_base 8: mod_base = OTHER; note = 2'-fluoro nucleotide
  modified_base 9: mod_base = OTHER; note = 2'-O-Methyl nucleotide
  modified_base 10: mod_base = OTHER; note = 2'-fluoro nucleotide
  modified_base 11: mod_base = OTHER; note = 2'-O-Methyl nucleotide
  modified_base 12: mod_base = OTHER; note = 2'-fluoro nucleotide
  modified_base 13: mod_base = OTHER; note = 2'-O-Methyl nucleotide
  modified_base 14: mod_base = OTHER; note = 2'-fluoro nucleotide
  modified_base 15: mod_base = OTHER; note = 2'-O-Methyl nucleotide
  modified_base 16: mod_base = OTHER; note = 2'-fluoro nucleotide
  modified_base 17: mod_base = OTHER; note = 2'-O-Methyl nucleotide
  modified_base 18: mod_base = OTHER; note = 2'-fluoro nucleotide
  modified_base 19: mod_base = OTHER; note = 2'-O-Methyl nucleotide
  modified_base 20: mod_base = OTHER; note = deoxy-thymine phosphorothioate
  misc_feature 1..19: note = RNA
  misc_feature 20..21: note = DNA
acttcttacacttgcggactt

SEQ ID NO: 1814 - DNA, 21 bp, synthetic construct
  misc_feature 1..21: note = Description of Artificial Sequence: Synthetic oligonucleotide
  source 1..21: mol_type = other DNA
  modified_base 1: mod_base = OTHER; note = 2'-O-Methyl nucleotide
  modified_base 2: mod_base = OTHER; note = 2'-O-Methyl nucleotide
  modified_base 3: mod_base = OTHER; note = 2'-fluoro nucleotide
  modified_base 4: mod_base = OTHER; note = 2'-O-Methyl nucleotide
  modified_base 5: mod_base = OTHER; note = 2'-fluoro nucleotide
  modified_base 6: mod_base = OTHER; note = 2'-O-Methyl nucleotide
  modified_base 7: mod_base = OTHER; note = 2'-fluoro nucleotide
  modified_base 8: mod_base = OTHER; note = 2'-O-Methyl nucleotide
  modified_base 9: mod_base = OTHER; note = 2'-fluoro nucleotide
  modified_base 10: mod_base = OTHER; note = 2'-O-Methyl nucleotide
  modified_base 11: mod_base = OTHER; note = 2'-fluoro nucleotide
  modified_base 12: mod_base = OTHER; note = 2'-O-Methyl nucleotide
  modified_base 13: mod_base = OTHER; note = 2'-fluoro nucleotide
  modified_base 14: mod_base = OTHER; note = 2'-O-Methyl nucleotide
  modified_base 15: mod_base = OTHER; note = 2'-fluoro nucleotide
  modified_base 16: mod_base = OTHER; note = 2'-O-Methyl nucleotide
  modified_base 17: mod_base = OTHER; note = 2'-fluoro nucleotide
  modified_base 18: mod_base = OTHER; note = 2'-O-Methyl nucleotide
  modified_base 19: mod_base = OTHER; note = 2'-fluoro nucleotide
  modified_base 20: mod_base = OTHER; note = deoxy-thymine phosphorothioate
  misc_feature 1..19: note = RNA
  misc_feature 20..21: note = DNA
tccgcaagtgtaagaagtgtt

SEQ ID NO: 1815 - DNA, 21 bp, synthetic construct
  misc_feature 1..21: note = Description of Artificial Sequence: Synthetic oligonucleotide
  source 1..21: mol_type = other DNA
  modified_base 1: mod_base = OTHER; note = 2'-fluoro nucleotide
  modified_base 2: mod_base = OTHER; note = 2'-fluoro nucleotide
  modified_base 3: mod_base = OTHER; note = 2'-O-Methyl nucleotide
  modified_base 4: mod_base = OTHER; note = 2'-fluoro nucleotide
  modified_base 5: mod_base = OTHER; note = 2'-O-Methyl nucleotide
  modified_base 6: mod_base = OTHER; note = 2'-fluoro nucleotide
  modified_base 7: mod_base = OTHER; note = 2'-O-Methyl nucleotide
  modified_base 8: mod_base = OTHER; note = 2'-fluoro nucleotide
  modified_base 9: mod_base = OTHER; note = 2'-O-Methyl nucleotide
  modified_base 10: mod_base = OTHER; note = 2'-fluoro nucleotide
  modified_base 11: mod_base = OTHER; note = 2'-O-Methyl nucleotide
  modified_base 12: mod_base = OTHER; note = 2'-fluoro nucleotide
  modified_base 13: mod_base = OTHER; note = 2'-O-Methyl nucleotide
  modified_base 14: mod_base = OTHER; note = 2'-fluoro nucleotide
  modified_base 15: mod_base = OTHER; note = 2'-O-Methyl nucleotide
  modified_base 16: mod_base = OTHER; note = 2'-fluoro nucleotide
  modified_base 17: mod_base = OTHER; note = 2'-O-Methyl nucleotide
  modified_base 18: mod_base = OTHER; note = 2'-fluoro nucleotide
  modified_base 19: mod_base = OTHER; note = 2'-O-Methyl nucleotide
  modified_base 20: mod_base = OTHER; note = deoxy-thymine phosphorothioate
  misc_feature 1..19: note = RNA
  misc_feature 20..21: note = DNA
cacttcttacacttgcggatt

SEQ ID NO: 1816 - DNA, 21 bp, synthetic construct
  misc_feature 1..21: note = Description of Artificial Sequence: Synthetic oligonucleotide
  source 1..21: mol_type = other DNA
  modified_base 1: mod_base = OTHER; note = 2'-O-Methyl nucleotide
  modified_base 2: mod_base = OTHER; note = 2'-O-Methyl nucleotide
  modified_base 3: mod_base = OTHER; note = 2'-fluoro nucleotide
  modified_base 4: mod_base = OTHER; note = 2'-O-Methyl nucleotide
  modified_base 5: mod_base = OTHER; note = 2'-fluoro nucleotide
  modified_base 6: mod_base = OTHER; note = 2'-O-Methyl nucleotide
  modified_base 7: mod_base = OTHER; note = 2'-fluoro nucleotide
  modified_base 8: mod_base = OTHER; note = 2'-O-Methyl nucleotide
  modified_base 9: mod_base = OTHER; note = 2'-fluoro nucleotide
  modified_base 10: mod_base = OTHER; note = 2'-O-Methyl nucleotide
  modified_base 11: mod_base = OTHER; note = 2'-fluoro nucleotide
  modified_base 12: mod_base = OTHER; note = 2'-O-Methyl nucleotide
  modified_base 13: mod_base = OTHER; note = 2'-fluoro nucleotide
  modified_base 14: mod_base = OTHER; note = 2'-O-Methyl nucleotide
  modified_base 15: mod_base = OTHER; note = 2'-fluoro nucleotide
  modified_base 16: mod_base = OTHER; note = 2'-O-Methyl nucleotide
  modified_base 17: mod_base = OTHER; note = 2'-fluoro nucleotide
  modified_base 18: mod_base = OTHER; note = 2'-O-Methyl nucleotide
  modified_base 19: mod_base = OTHER; note = 2'-fluoro nucleotide
  modified_base 20: mod_base = OTHER; note = deoxy-thymine phosphorothioate
  misc_feature 1..19: note = RNA
  misc_feature 20..21: note = DNA
ccgcaagtgtaagaagtgctt

SEQ ID NO: 1817 - DNA, 21 bp, synthetic construct
  misc_feature 1..21: note = Description of Artificial Sequence: Synthetic oligonucleotide
  source 1..21: mol_type = other DNA
  modified_base 1: mod_base = OTHER; note = 2'-fluoro nucleotide
  modified_base 2: mod_base = OTHER; note = 2'-fluoro nucleotide
  modified_base 3: mod_base = OTHER; note = 2'-O-Methyl nucleotide
  modified_base 4: mod_base = OTHER; note = 2'-fluoro nucleotide
  modified_base 5: mod_base = OTHER; note = 2'-O-Methyl nucleotide
  modified_base 6: mod_base = OTHER; note = 2'-fluoro nucleotide
  modified_base 7: mod_base = OTHER; note = 2'-O-Methyl nucleotide
  modified_base 8: mod_base = OTHER; note = 2'-fluoro nucleotide
  modified_base 9: mod_base = OTHER; note = 2'-O-Methyl nucleotide
  modified_base 10: mod_base = OTHER; note = 2'-fluoro nucleotide
  modified_base 11: mod_base = OTHER; note = 2'-O-Methyl nucleotide
  modified_base 12: mod_base = OTHER; note = 2'-fluoro nucleotide
  modified_base 13: mod_base = OTHER; note = 2'-O-Methyl nucleotide
  modified_base 14: mod_base = OTHER; note = 2'-fluoro nucleotide
  modified_base 15: mod_base = OTHER; note = 2'-O-Methyl nucleotide
  modified_base 16: mod_base = OTHER; note = 2'-fluoro nucleotide
  modified_base 17: mod_base = OTHER; note = 2'-O-Methyl nucleotide
  modified_base 18: mod_base = OTHER; note = 2'-fluoro nucleotide
  modified_base 19: mod_base = OTHER; note = 2'-O-Methyl nucleotide
  modified_base 20: mod_base = OTHER; note = deoxy-thymine phosphorothioate
  misc_feature 1..19: note = RNA
  misc_feature 20..21: note = DNA
gcacttcttacacttgcggtt

SEQ ID NO: 1818 - DNA, 21 bp, synthetic construct
  misc_feature 1..21: note = Description of Artificial Sequence: Synthetic oligonucleotide
  source 1..21: mol_type = other DNA
  modified_base 1: mod_base = OTHER; note = 2'-O-Methyl nucleotide
  modified_base 2: mod_base = OTHER; note = 2'-O-Methyl nucleotide
  modified_base 3: mod_base = OTHER; note = 2'-fluoro nucleotide
  modified_base 4: mod_base = OTHER; note = 2'-O-Methyl nucleotide
  modified_base 5: mod_base = OTHER; note = 2'-fluoro nucleotide
  modified_base 6: mod_base = OTHER; note = 2'-O-Methyl nucleotide
  modified_base 7: mod_base = OTHER; note = 2'-fluoro nucleotide
  modified_base 8: mod_base = OTHER; note = 2'-O-Methyl nucleotide
  modified_base 9: mod_base = OTHER; note = 2'-fluoro nucleotide
  modified_base 10: mod_base = OTHER; note = 2'-O-Methyl nucleotide
  modified_base 11: mod_base = OTHER; note = 2'-fluoro nucleotide
  modified_base 12: mod_base = OTHER; note = 2'-O-Methyl nucleotide
  modified_base 13: mod_base = OTHER; note = 2'-fluoro nucleotide
  modified_base 14: mod_base = OTHER; note = 2'-O-Methyl nucleotide
  modified_base 15: mod_base = OTHER; note = 2'-fluoro nucleotide
  modified_base 16: mod_base = OTHER; note = 2'-O-Methyl nucleotide
  modified_base 17: mod_base = OTHER; note = 2'-fluoro nucleotide
  modified_base 18: mod_base = OTHER; note = 2'-O-Methyl nucleotide
  modified_base 19: mod_base = OTHER; note = 2'-fluoro nucleotide
  modified_base 20: mod_base = OTHER; note = deoxy-thymine phosphorothioate
  misc_feature 1..19: note = RNA
  misc_feature 20..21: note = DNA
cgcaagtgtaagaagtgcgtt

SEQ ID NO: 1819 - DNA, 21 bp, synthetic construct
  misc_feature 1..21: note = Description of Artificial Sequence: Synthetic oligonucleotide
  source 1..21: mol_type = other DNA
  modified_base 1: mod_base = OTHER; note = 2'-fluoro nucleotide
  modified_base 2: mod_base = OTHER; note = 2'-fluoro nucleotide
  modified_base 3: mod_base = OTHER; note = 2'-O-Methyl nucleotide
  modified_base 4: mod_base = OTHER; note = 2'-fluoro nucleotide
  modified_base 5: mod_base = OTHER; note = 2'-O-Methyl nucleotide
  modified_base 6: mod_base = OTHER; note = 2'-fluoro nucleotide
  modified_base 7: mod_base = OTHER; note = 2'-O-Methyl nucleotide
  modified_base 8: mod_base = OTHER; note = 2'-fluoro nucleotide
  modified_base 9: mod_base = OTHER; note = 2'-O-Methyl nucleotide
  modified_base 10: mod_base = OTHER; note = 2'-fluoro nucleotide
  modified_base 11: mod_base = OTHER; note = 2'-O-Methyl nucleotide
  modified_base 12: mod_base = OTHER; note = 2'-fluoro nucleotide
  modified_base 13: mod_base = OTHER; note = 2'-O-Methyl nucleotide
  modified_base 14: mod_base = OTHER; note = 2'-fluoro nucleotide
  modified_base 15: mod_base = OTHER; note = 2'-O-Methyl nucleotide
  modified_base 16: mod_base = OTHER; note = 2'-fluoro nucleotide
  modified_base 17: mod_base = OTHER; note = 2'-O-Methyl nucleotide
  modified_base 18: mod_base = OTHER; note = 2'-fluoro nucleotide
  modified_base 19: mod_base = OTHER; note = 2'-O-Methyl nucleotide
  modified_base 20: mod_base = OTHER; note = deoxy-thymine phosphorothioate
  misc_feature 1..19: note = RNA
  misc_feature 20..21: note = DNA
cgcacttcttacacttgcgtt

SEQ ID NO: 1820 - DNA, 21 bp, synthetic construct
  misc_feature 1..21: note = Description of Artificial Sequence: Synthetic oligonucleotide
  source 1..21: mol_type = other DNA
  modified_base 1: mod_base = OTHER; note = 2'-O-Methyl nucleotide
  modified_base 2: mod_base = OTHER; note = 2'-O-Methyl nucleotide
  modified_base 3: mod_base = OTHER; note = 2'-fluoro nucleotide
  modified_base 4: mod_base = OTHER; note = 2'-O-Methyl nucleotide
  modified_base 5: mod_base = OTHER; note = 2'-fluoro nucleotide
  modified_base 6: mod_base = OTHER; note = 2'-O-Methyl nucleotide
  modified_base 7: mod_base = OTHER; note = 2'-fluoro nucleotide
  modified_base 8: mod_base = OTHER; note = 2'-O-Methyl nucleotide
  modified_base 9: mod_base = OTHER; note = 2'-fluoro nucleotide
  modified_base 10: mod_base = OTHER; note = 2'-O-Methyl nucleotide
  modified_base 11: mod_base = OTHER; note = 2'-fluoro nucleotide
  modified_base 12: mod_base = OTHER; note = 2'-O-Methyl nucleotide
  modified_base 13: mod_base = OTHER; note = 2'-fluoro nucleotide
  modified_base 14: mod_base = OTHER; note = 2'-O-Methyl nucleotide
  modified_base 15: mod_base = OTHER; note = 2'-fluoro nucleotide
  modified_base 16: mod_base = OTHER; note = 2'-O-Methyl nucleotide
  modified_base 17: mod_base = OTHER; note = 2'-fluoro nucleotide
  modified_base 18: mod_base = OTHER; note = 2'-O-Methyl nucleotide
  modified_base 19: mod_base = OTHER; note = 2'-fluoro nucleotide
  modified_base 20: mod_base = OTHER; note = deoxy-thymine phosphorothioate
  misc_feature 1..19: note = RNA
  misc_feature 20..21: note = DNA
gcaagtgtaagaagtgcgatt

SEQ ID NO: 1821 - DNA, 21 bp, synthetic construct
  misc_feature 1..21: note = Description of Artificial Sequence: Synthetic oligonucleotide
  source 1..21: mol_type = other DNA
  modified_base 1: mod_base = OTHER; note = 2'-fluoro nucleotide
  modified_base 2: mod_base = OTHER; note = 2'-fluoro nucleotide
  modified_base 3: mod_base = OTHER; note = 2'-O-Methyl nucleotide
  modified_base 4: mod_base = OTHER; note = 2'-fluoro nucleotide
  modified_base 5: mod_base = OTHER; note = 2'-O-Methyl nucleotide
  modified_base 6: mod_base = OTHER; note = 2'-fluoro nucleotide
  modified_base 7: mod_base = OTHER; note = 2'-O-Methyl nucleotide
  modified_base 8: mod_base = OTHER; note = 2'-fluoro nucleotide
  modified_base 9: mod_base = OTHER; note = 2'-O-Methyl nucleotide
  modified_base 10: mod_base = OTHER; note = 2'-fluoro nucleotide
  modified_base 11: mod_base = OTHER; note = 2'-O-Methyl nucleotide
  modified_base 12: mod_base = OTHER; note = 2'-fluoro nucleotide
  modified_base 13: mod_base = OTHER; note = 2'-O-Methyl nucleotide
  modified_base 14: mod_base = OTHER; note = 2'-fluoro nucleotide
  modified_base 15: mod_base = OTHER; note = 2'-O-Methyl nucleotide
  modified_base 16: mod_base = OTHER; note = 2'-fluoro nucleotide
  modified_base 17: mod_base = OTHER; note = 2'-O-Methyl nucleotide
  modified_base 18: mod_base = OTHER; note = 2'-fluoro nucleotide
  modified_base 19: mod_base = OTHER; note = 2'-O-Methyl nucleotide
  modified_base 20: mod_base = OTHER; note = deoxy-thymine phosphorothioate
  misc_feature 1..19: note = RNA
  misc_feature 20..21: note = DNA
tcgcacttcttacacttgctt

SEQ ID NO: 1822 - DNA, 21 bp, synthetic construct
  misc_feature 1..21: note = Description of Artificial Sequence: Synthetic oligonucleotide
  source 1..21: mol_type = other DNA
  modified_base 1: mod_base = OTHER; note = 2'-O-Methyl nucleotide
  modified_base 2: mod_base = OTHER; note = 2'-O-Methyl nucleotide
  modified_base 3: mod_base = OTHER; note = 2'-fluoro nucleotide
  modified_base 4: mod_base = OTHER; note = 2'-O-Methyl nucleotide
  modified_base 5: mod_base = OTHER; note = 2'-fluoro nucleotide
  modified_base 6: mod_base = OTHER; note = 2'-O-Methyl nucleotide
  modified_base 7: mod_base = OTHER; note = 2'-fluoro nucleotide
  modified_base 8: mod_base = OTHER; note = 2'-O-Methyl nucleotide
  modified_base 9: mod_base = OTHER; note = 2'-fluoro nucleotide
  modified_base 10: mod_base = OTHER; note = 2'-O-Methyl nucleotide
  modified_base 11: mod_base = OTHER; note = 2'-fluoro nucleotide
  modified_base 12: mod_base = OTHER; note = 2'-O-Methyl nucleotide
  modified_base 13: mod_base = OTHER; note = 2'-fluoro nucleotide
  modified_base 14: mod_base = OTHER; note = 2'-O-Methyl nucleotide
  modified_base 15: mod_base = OTHER; note = 2'-fluoro nucleotide
  modified_base 16: mod_base = OTHER; note = 2'-O-Methyl nucleotide
  modified_base 17: mod_base = OTHER; note = 2'-fluoro nucleotide
  modified_base 18: mod_base = OTHER; note = 2'-O-Methyl nucleotide
  modified_base 19: mod_base = OTHER; note = 2'-fluoro nucleotide
  modified_base 20: mod_base = OTHER; note = deoxy-thymine phosphorothioate
  misc_feature 1..19: note = RNA
  misc_feature 20..21: note = DNA
aagtgtaagaagtgcgaagtt

SEQ ID NO: 1823 - DNA, 21 bp, synthetic construct
  misc_feature 1..21: note = Description of Artificial Sequence: Synthetic oligonucleotide
  source 1..21: mol_type = other DNA
  modified_base 1: mod_base = OTHER; note = 2'-fluoro nucleotide
  modified_base 2: mod_base = OTHER; note = 2'-fluoro nucleotide
  modified_base 3: mod_base = OTHER; note = 2'-O-Methyl nucleotide
  modified_base 4: mod_base = OTHER; note = 2'-fluoro nucleotide
  modified_base 5: mod_base = OTHER; note = 2'-O-Methyl nucleotide
  modified_base 6: mod_base = OTHER; note = 2'-fluoro nucleotide
  modified_base 7: mod_base = OTHER; note = 2'-O-Methyl nucleotide
  modified_base 8: mod_base = OTHER; note = 2'-fluoro nucleotide
  modified_base 9: mod_base = OTHER; note = 2'-O-Methyl nucleotide
  modified_base 10: mod_base = OTHER; note = 2'-fluoro nucleotide
  modified_base 11: mod_base = OTHER; note = 2'-O-Methyl nucleotide
  modified_base 12: mod_base = OTHER; note = 2'-fluoro nucleotide
  modified_base 13: mod_base = OTHER; note = 2'-O-Methyl nucleotide
  modified_base 14: mod_base = OTHER; note = 2'-fluoro nucleotide
  modified_base 15: mod_base = OTHER; note = 2'-O-Methyl nucleotide
  modified_base 16: mod_base = OTHER; note = 2'-fluoro nucleotide
  modified_base 17: mod_base = OTHER; note = 2'-O-Methyl nucleotide
  modified_base 18: mod_base = OTHER; note = 2'-fluoro nucleotide
  modified_base 19: mod_base = OTHER; note = 2'-O-Methyl nucleotide
  modified_base 20: mod_base = OTHER; note = deoxy-thymine phosphorothioate
  misc_feature 1..19: note = RNA
  misc_feature 20..21: note = DNA
cttcgcacttcttacactttt

SEQ ID NO: 1824 - DNA, 21 bp, synthetic construct
  misc_feature 1..21: note = Description of Artificial Sequence: Synthetic oligonucleotide
  source 1..21: mol_type = other DNA
  modified_base 1: mod_base = OTHER; note = 2'-O-Methyl nucleotide
  modified_base 2: mod_base = OTHER; note = 2'-O-Methyl nucleotide
  modified_base 3: mod_base = OTHER; note = 2'-fluoro nucleotide
  modified_base 4: mod_base = OTHER; note = 2'-O-Methyl nucleotide
  modified_base 5: mod_base = OTHER; note = 2'-fluoro nucleotide
  modified_base 6: mod_base = OTHER; note = 2'-O-Methyl nucleotide
  modified_base 7: mod_base = OTHER; note = 2'-fluoro nucleotide
  modified_base 8: mod_base = OTHER; note = 2'-O-Methyl nucleotide
  modified_base 9: mod_base = OTHER; note = 2'-fluoro nucleotide
  modified_base 10: mod_base = OTHER; note = 2'-O-Methyl nucleotide
  modified_base 11: mod_base = OTHER; note = 2'-fluoro nucleotide
  modified_base 12: mod_base = OTHER; note = 2'-O-Methyl nucleotide
  modified_base 13: mod_base = OTHER; note = 2'-fluoro nucleotide
  modified_base 14: mod_base = OTHER; note = 2'-O-Methyl nucleotide
  modified_base 15: mod_base = OTHER; note = 2'-fluoro nucleotide
  modified_base 16: mod_base = OTHER; note = 2'-O-Methyl nucleotide
  modified_base 17: mod_base = OTHER; note = 2'-fluoro nucleotide
  modified_base 18: mod_base = OTHER; note = 2'-O-Methyl nucleotide
  modified_base 19: mod_base = OTHER; note = 2'-fluoro nucleotide
  modified_base 20: mod_base = OTHER; note = deoxy-thymine phosphorothioate
  misc_feature 1..19: note = RNA
  misc_feature 20..21: note = DNA
agtgtaagaagtgcgaaggtt

SEQ ID NO: 1825 - DNA, 21 bp, synthetic construct
  misc_feature 1..21: note = Description of Artificial Sequence: Synthetic oligonucleotide
  source 1..21: mol_type = other DNA
  modified_base 1: mod_base = OTHER; note = 2'-fluoro nucleotide
  modified_base 2: mod_base = OTHER; note = 2'-fluoro nucleotide
  modified_base 3: mod_base = OTHER; note = 2'-O-Methyl nucleotide
  modified_base 4: mod_base = OTHER; note = 2'-fluoro nucleotide
  modified_base 5: mod_base = OTHER; note = 2'-O-Methyl nucleotide
  modified_base 6: mod_base = OTHER; note = 2'-fluoro nucleotide
  modified_base 7: mod_base = OTHER; note = 2'-O-Methyl nucleotide
  modified_base 8: mod_base = OTHER; note = 2'-fluoro nucleotide
  modified_base 9: mod_base = OTHER; note = 2'-O-Methyl nucleotide
  modified_base 10: mod_base = OTHER; note = 2'-fluoro nucleotide
  modified_base 11: mod_base = OTHER; note = 2'-O-Methyl nucleotide
  modified_base 12: mod_base = OTHER; note = 2'-fluoro nucleotide
  modified_base 13: mod_base = OTHER; note = 2'-O-Methyl nucleotide
  modified_base 14: mod_base = OTHER; note = 2'-fluoro nucleotide
  modified_base 15: mod_base = OTHER; note = 2'-O-Methyl nucleotide
  modified_base 16: mod_base = OTHER; note = 2'-fluoro nucleotide
  modified_base 17: mod_base = OTHER; note = 2'-O-Methyl nucleotide
  modified_base 18: mod_base = OTHER; note = 2'-fluoro nucleotide
  modified_base 19: mod_base = OTHER; note = 2'-O-Methyl nucleotide
  modified_base 20: mod_base = OTHER; note = deoxy-thymine phosphorothioate
  misc_feature 1..19: note = RNA
  misc_feature 20..21: note = DNA
ccttcgcacttcttacacttt

SEQ ID NO: 1826 - DNA, 21 bp, synthetic construct
  misc_feature 1..21: note = Description of Artificial Sequence: Synthetic oligonucleotide
  source 1..21: mol_type = other DNA
  modified_base 1: mod_base = OTHER; note = 2'-O-Methyl nucleotide
  modified_base 2: mod_base = OTHER; note = 2'-O-Methyl nucleotide
  modified_base 3: mod_base = OTHER; note = 2'-fluoro nucleotide
  modified_base 4: mod_base = OTHER; note = 2'-O-Methyl nucleotide
  modified_base 5: mod_base = OTHER; note = 2'-fluoro nucleotide
  modified_base 6: mod_base = OTHER; note = 2'-O-Methyl nucleotide
  modified_base 7: mod_base = OTHER; note = 2'-fluoro nucleotide
  modified_base 8: mod_base = OTHER; note = 2'-O-Methyl nucleotide
  modified_base 9: mod_base = OTHER; note = 2'-fluoro nucleotide
  modified_base 10: mod_base = OTHER; note = 2'-O-Methyl nucleotide
  modified_base 11: mod_base = OTHER; note = 2'-fluoro nucleotide
  modified_base 12: mod_base = OTHER; note = 2'-O-Methyl nucleotide
  modified_base 13: mod_base = OTHER; note = 2'-fluoro nucleotide
  modified_base 14: mod_base = OTHER; note = 2'-O-Methyl nucleotide
  modified_base 15: mod_base = OTHER; note = 2'-fluoro nucleotide
  modified_base 16: mod_base = OTHER; note = 2'-O-Methyl nucleotide
  modified_base 17: mod_base = OTHER; note = 2'-fluoro nucleotide
  modified_base 18: mod_base = OTHER; note = 2'-O-Methyl nucleotide
  modified_base 19: mod_base = OTHER; note = 2'-fluoro nucleotide
  modified_base 20: mod_base = OTHER; note = deoxy-thymine phosphorothioate
  misc_feature 1..19: note = RNA
  misc_feature 20..21: note = DNA
gtgtaagaagtgcgaagggtt

SEQ ID NO: 1827 - DNA, 21 bp, synthetic construct
  misc_feature 1..21: note = Description of Artificial Sequence: Synthetic oligonucleotide
  source 1..21: mol_type = other DNA
  modified_base 1: mod_base = OTHER; note = 2'-fluoro nucleotide
  modified_base 2: mod_base = OTHER; note = 2'-fluoro nucleotide
  modified_base 3: mod_base = OTHER; note = 2'-O-Methyl nucleotide
  modified_base 4: mod_base = OTHER; note = 2'-fluoro nucleotide
  modified_base 5: mod_base = OTHER; note = 2'-O-Methyl nucleotide
  modified_base 6: mod_base = OTHER; note = 2'-fluoro nucleotide
  modified_base 7: mod_base = OTHER; note = 2'-O-Methyl nucleotide
  modified_base 8: mod_base = OTHER; note = 2'-fluoro nucleotide
  modified_base 9: mod_base = OTHER; note = 2'-O-Methyl nucleotide
  modified_base 10: mod_base = OTHER; note = 2'-fluoro nucleotide
  modified_base 11: mod_base = OTHER; note = 2'-O-Methyl nucleotide
  modified_base 12: mod_base = OTHER; note = 2'-fluoro nucleotide
  modified_base 13: mod_base = OTHER; note = 2'-O-Methyl nucleotide
  modified_base 14: mod_base = OTHER; note = 2'-fluoro nucleotide
  modified_base 15: mod_base = OTHER; note = 2'-O-Methyl nucleotide
  modified_base 16: mod_base = OTHER; note = 2'-fluoro nucleotide
  modified_base 17: mod_base = OTHER; note = 2'-O-Methyl nucleotide
  modified_base 18: mod_base = OTHER; note = 2'-fluoro nucleotide
  modified_base 19: mod_base = OTHER; note = 2'-O-Methyl nucleotide
  modified_base 20: mod_base = OTHER; note = deoxy-thymine phosphorothioate
  misc_feature 1..19: note = RNA
  misc_feature 20..21: note = DNA
cccttcgcacttcttacactt

SEQ ID NO: 1828 - DNA, 21 bp, synthetic construct
  misc_feature 1..21: note = Description of Artificial Sequence: Synthetic oligonucleotide
  source 1..21: mol_type = other DNA
  modified_base 1: mod_base = OTHER; note = 2'-O-Methyl nucleotide
  modified_base 2: mod_base = OTHER; note = 2'-O-Methyl nucleotide
  modified_base 3: mod_base = OTHER; note = 2'-fluoro nucleotide
  modified_base 4: mod_base = OTHER; note = 2'-O-Methyl nucleotide
  modified_base 5: mod_base = OTHER; note = 2'-fluoro nucleotide
  modified_base 6: mod_base = OTHER; note = 2'-O-Methyl nucleotide
  modified_base 7: mod_base = OTHER; note = 2'-fluoro nucleotide
  modified_base 8: mod_base = OTHER; note = 2'-O-Methyl nucleotide
  modified_base 9: mod_base = OTHER; note = 2'-fluoro nucleotide
  modified_base 10: mod_base = OTHER; note = 2'-O-Methyl nucleotide
  modified_base 11: mod_base = OTHER; note = 2'-fluoro nucleotide
  modified_base 12: mod_base = OTHER; note = 2'-O-Methyl nucleotide
  modified_base 13: mod_base = OTHER; note = 2'-fluoro nucleotide
  modified_base 14: mod_base = OTHER; note = 2'-O-Methyl nucleotide
  modified_base 15: mod_base = OTHER; note = 2'-fluoro nucleotide
  modified_base 16: mod_base = OTHER; note = 2'-O-Methyl nucleotide
  modified_base 17: mod_base = OTHER; note = 2'-fluoro nucleotide
  modified_base 18: mod_base = OTHER; note = 2'-O-Methyl nucleotide
  modified_base 19: mod_base = OTHER; note = 2'-fluoro nucleotide
  modified_base 20: mod_base = OTHER; note = deoxy-thymine phosphorothioate
  misc_feature 1..19: note = RNA
  misc_feature 20..21: note = DNA
tgtaagaagtgcgaagggctt

SEQ ID NO: 1829 - DNA, 21 bp, synthetic construct
  misc_feature 1..21: note = Description of Artificial Sequence: Synthetic oligonucleotide
  source 1..21: mol_type = other DNA
  modified_base 1: mod_base = OTHER; note = 2'-fluoro nucleotide
  modified_base 2: mod_base = OTHER; note = 2'-fluoro nucleotide
  modified_base 3: mod_base = OTHER; note = 2'-O-Methyl nucleotide
  modified_base 4: mod_base = OTHER; note = 2'-fluoro nucleotide
  modified_base 5: mod_base = OTHER; note = 2'-O-Methyl nucleotide
  modified_base 6: mod_base = OTHER; note = 2'-fluoro nucleotide
  modified_base 7: mod_base = OTHER; note = 2'-O-Methyl nucleotide
  modified_base 8: mod_base = OTHER; note = 2'-fluoro nucleotide
  modified_base 9: mod_base = OTHER; note = 2'-O-Methyl nucleotide
  modified_base 10: mod_base = OTHER; note = 2'-fluoro nucleotide
  modified_base 11: mod_base = OTHER; note = 2'-O-Methyl nucleotide
  modified_base 12: mod_base = OTHER; note = 2'-fluoro nucleotide
  modified_base 13: mod_base = OTHER; note = 2'-O-Methyl nucleotide
  modified_base 14: mod_base = OTHER; note = 2'-fluoro nucleotide
  modified_base 15: mod_base = OTHER; note = 2'-O-Methyl nucleotide
  modified_base 16: mod_base = OTHER; note = 2'-fluoro nucleotide
  modified_base 17: mod_base = OTHER; note = 2'-O-Methyl nucleotide
  modified_base 18: mod_base = OTHER; note = 2'-fluoro nucleotide
  modified_base 19: mod_base = OTHER; note = 2'-O-Methyl nucleotide
  modified_base 20: mod_base = OTHER; note = deoxy-thymine phosphorothioate
  misc_feature 1..19: note = RNA
  misc_feature 20..21: note = DNA
gcccttcgcacttcttacatt

SEQ ID NO: 1830 - DNA, 21 bp, synthetic construct
  misc_feature 1..21: note = Description of Artificial Sequence: Synthetic oligonucleotide
  source 1..21: mol_type = other DNA
  modified_base 1: mod_base = OTHER; note = 2'-O-Methyl nucleotide
  modified_base 2: mod_base = OTHER; note = 2'-O-Methyl nucleotide
  modified_base 3: mod_base = OTHER; note = 2'-fluoro nucleotide
  modified_base 4: mod_base = OTHER; note = 2'-O-Methyl nucleotide
  modified_base 5: mod_base = OTHER; note = 2'-fluoro nucleotide
  modified_base 6: mod_base = OTHER; note = 2'-O-Methyl nucleotide
  modified_base 7: mod_base = OTHER; note = 2'-fluoro nucleotide
  modified_base 8: mod_base = OTHER; note = 2'-O-Methyl nucleotide
  modified_base 9: mod_base = OTHER; note = 2'-fluoro nucleotide
  modified_base 10: mod_base = OTHER; note = 2'-O-Methyl nucleotide
  modified_base 11: mod_base = OTHER; note = 2'-fluoro nucleotide
  modified_base 12: mod_base = OTHER; note = 2'-O-Methyl nucleotide
  modified_base 13: mod_base = OTHER; note = 2'-fluoro nucleotide
  modified_base 14: mod_base = OTHER; note = 2'-O-Methyl nucleotide
  modified_base 15: mod_base = OTHER; note = 2'-fluoro nucleotide
  modified_base 16: mod_base = OTHER; note = 2'-O-Methyl nucleotide
  modified_base 17: mod_base = OTHER; note = 2'-fluoro nucleotide
  modified_base 18: mod_base = OTHER; note = 2'-O-Methyl nucleotide
  modified_base 19: mod_base = OTHER; note = 2'-fluoro nucleotide
  modified_base 20: mod_base = OTHER; note = deoxy-thymine phosphorothioate
  misc_feature 1..19: note = RNA
  misc_feature 20..21: note = DNA
gtaagaagtgcgaagggcctt

SEQ ID NO: 1831 - DNA, 21 bp, synthetic construct
  misc_feature 1..21: note = Description of Artificial Sequence: Synthetic oligonucleotide
  source 1..21: mol_type = other DNA
  modified_base 1: mod_base = OTHER; note = 2'-fluoro nucleotide
  modified_base 2: mod_base = OTHER; note = 2'-fluoro nucleotide
  modified_base 3: mod_base = OTHER; note = 2'-O-Methyl nucleotide
  modified_base 4: mod_base = OTHER; note = 2'-fluoro nucleotide
  modified_base 5: mod_base = OTHER; note = 2'-O-Methyl nucleotide
  modified_base 6: mod_base = OTHER; note = 2'-fluoro nucleotide
  modified_base 7: mod_base = OTHER; note = 2'-O-Methyl nucleotide
  modified_base 8: mod_base = OTHER; note = 2'-fluoro nucleotide
  modified_base 9: mod_base = OTHER; note = 2'-O-Methyl nucleotide
  modified_base 10: mod_base = OTHER; note = 2'-fluoro nucleotide
  modified_base 11: mod_base = OTHER; note = 2'-O-Methyl nucleotide
  modified_base 12: mod_base = OTHER; note = 2'-fluoro nucleotide
  modified_base 13: mod_base = OTHER; note = 2'-O-Methyl nucleotide
  modified_base 14: mod_base = OTHER; note = 2'-fluoro nucleotide
  modified_base 15: mod_base = OTHER; note = 2'-O-Methyl nucleotide
  modified_base 16: mod_base = OTHER; note = 2'-fluoro nucleotide
  modified_base 17: mod_base = OTHER; note = 2'-O-Methyl nucleotide
  modified_base 18: mod_base = OTHER; note = 2'-fluoro nucleotide
  modified_base 19: mod_base = OTHER; note = 2'-O-Methyl nucleotide
  modified_base 20: mod_base = OTHER; note = deoxy-thymine phosphorothioate
  misc_feature 1..19: note = RNA
  misc_feature 20..21: note = DNA
ggcccttcgcacttcttactt

SEQ ID NO: 1832 - DNA, 21 bp, synthetic construct
  misc_feature 1..21: note = Description of Artificial Sequence: Synthetic oligonucleotide
  source 1..21: mol_type = other DNA
  modified_base 1: mod_base = OTHER; note = 2'-O-Methyl nucleotide
  modified_base 2: mod_base = OTHER; note = 2'-O-Methyl nucleotide
  modified_base 3: mod_base = OTHER; note = 2'-fluoro nucleotide
  modified_base 4: mod_base = OTHER; note = 2'-O-Methyl nucleotide
  modified_base 5: mod_base = OTHER; note = 2'-fluoro nucleotide
  modified_base 6: mod_base = OTHER; note = 2'-O-Methyl nucleotide
  modified_base 7: mod_base = OTHER; note = 2'-fluoro nucleotide
  modified_base 8: mod_base = OTHER; note = 2'-O-Methyl nucleotide
  modified_base 9: mod_base = OTHER; note = 2'-fluoro nucleotide
  modified_base 10: mod_base = OTHER; note = 2'-O-Methyl nucleotide
  modified_base 11: mod_base = OTHER; note = 2'-fluoro nucleotide
  modified_base 12: mod_base = OTHER; note = 2'-O-Methyl nucleotide
  modified_base 13: mod_base = OTHER; note = 2'-fluoro nucleotide
  modified_base 14: mod_base = OTHER; note = 2'-O-Methyl nucleotide
  modified_base 15: mod_base = OTHER; note = 2'-fluoro nucleotide
  modified_base 16: mod_base = OTHER; note = 2'-O-Methyl nucleotide
  modified_base 17: mod_base = OTHER; note = 2'-fluoro nucleotide
  modified_base 18: mod_base = OTHER; note = 2'-O-Methyl nucleotide
  modified_base 19: mod_base = OTHER; note = 2'-fluoro nucleotide
  modified_base 20: mod_base = OTHER; note = deoxy-thymine phosphorothioate
  misc_feature 1..19: note = RNA
  misc_feature 20..21: note = DNA
taagaagtgcgaagggccttt

SEQ ID NO: 1833 - DNA, 21 bp, synthetic construct
  misc_feature 1..21: note = Description of Artificial Sequence: Synthetic oligonucleotide
  source 1..21: mol_type = other DNA
  modified_base 1: mod_base = OTHER; note = 2'-fluoro nucleotide
  modified_base 2: mod_base = OTHER; note = 2'-fluoro nucleotide
  modified_base 3: mod_base = OTHER; note = 2'-O-Methyl nucleotide
  modified_base 4: mod_base = OTHER; note = 2'-fluoro nucleotide
  modified_base 5: mod_base = OTHER; note = 2'-O-Methyl nucleotide
  modified_base 6: mod_base = OTHER; note = 2'-fluoro nucleotide
  modified_base 7: mod_base = OTHER; note = 2'-O-Methyl nucleotide
  modified_base 8: mod_base = OTHER; note = 2'-fluoro nucleotide
  modified_base 9: mod_base = OTHER; note = 2'-O-Methyl nucleotide
  modified_base 10: mod_base = OTHER; note = 2'-fluoro nucleotide
  modified_base 11: mod_base = OTHER; note = 2'-O-Methyl nucleotide
  modified_base 12: mod_base = OTHER; note = 2'-fluoro nucleotide
  modified_base 13: mod_base = OTHER; note = 2'-O-Methyl nucleotide
  modified_base 14: mod_base = OTHER; note = 2'-fluoro nucleotide
  modified_base 15: mod_base = OTHER; note = 2'-O-Methyl nucleotide
  modified_base 16: mod_base = OTHER; note = 2'-fluoro nucleotide
  modified_base 17: mod_base = OTHER; note = 2'-O-Methyl nucleotide
  modified_base 18: mod_base = OTHER; note = 2'-fluoro nucleotide
  modified_base 19: mod_base = OTHER; note = 2'-O-Methyl nucleotide
  modified_base 20: mod_base = OTHER; note = deoxy-thymine phosphorothioate
  misc_feature 1..19: note = RNA
  misc_feature 20..21: note = DNA
aggcccttcgcacttcttatt

SEQ ID NO: 1834 - DNA, 21 bp, synthetic construct
  misc_feature 1..21: note = Description of Artificial Sequence: Synthetic oligonucleotide
  source 1..21: mol_type = other DNA
  modified_base 1: mod_base = OTHER; note = 2'-O-Methyl nucleotide
  modified_base 2: mod_base = OTHER; note = 2'-O-Methyl nucleotide
  modified_base 3: mod_base = OTHER; note = 2'-fluoro nucleotide
  modified_base 4: mod_base = OTHER; note = 2'-O-Methyl nucleotide
  modified_base 5: mod_base = OTHER; note = 2'-fluoro nucleotide
  modified_base 6: mod_base = OTHER; note = 2'-O-Methyl nucleotide
  modified_base 7: mod_base = OTHER; note = 2'-fluoro nucleotide
  modified_base 8: mod_base = OTHER; note = 2'-O-Methyl nucleotide
  modified_base 9: mod_base = OTHER; note = 2'-fluoro nucleotide
  modified_base 10: mod_base = OTHER; note = 2'-O-Methyl nucleotide
  modified_base 11: mod_base = OTHER; note = 2'-fluoro nucleotide
  modified_base 12: mod_base = OTHER; note = 2'-O-Methyl nucleotide
  modified_base 13: mod_base = OTHER; note = 2'-fluoro nucleotide
  modified_base 14: mod_base = OTHER; note = 2'-O-Methyl nucleotide
  modified_base 15: mod_base = OTHER; note = 2'-fluoro nucleotide
  modified_base 16: mod_base = OTHER; note = 2'-O-Methyl nucleotide
  modified_base 17: mod_base = OTHER; note = 2'-fluoro nucleotide
  modified_base 18: mod_base = OTHER; note = 2'-O-Methyl nucleotide
  modified_base 19: mod_base = OTHER; note = 2'-fluoro nucleotide
  modified_base 20: mod_base = OTHER; note = deoxy-thymine phosphorothioate
  misc_feature 1..19: note = RNA
  misc_feature 20..21: note = DNA
aagaagtgcgaagggcctttt

SEQ ID NO: 1835 - DNA, 21 bp, synthetic construct
  misc_feature 1..21: note = Description of Artificial Sequence: Synthetic oligonucleotide
  source 1..21: mol_type = other DNA
  modified_base 1: mod_base = OTHER; note = 2'-fluoro nucleotide
  modified_base 2: mod_base = OTHER; note = 2'-fluoro nucleotide
  modified_base 3: mod_base = OTHER; note = 2'-O-Methyl nucleotide
  modified_base 4: mod_base = OTHER; note = 2'-fluoro nucleotide
  modified_base 5: mod_base = OTHER; note = 2'-O-Methyl nucleotide
  modified_base 6: mod_base = OTHER; note = 2'-fluoro nucleotide
  modified_base 7: mod_base = OTHER; note = 2'-O-Methyl nucleotide
  modified_base 8: mod_base = OTHER; note = 2'-fluoro nucleotide
  modified_base 9: mod_base = OTHER; note = 2'-O-Methyl nucleotide
  modified_base 10: mod_base = OTHER; note = 2'-fluoro nucleotide
  modified_base 11: mod_base = OTHER; note = 2'-O-Methyl nucleotide
  modified_base 12: mod_base = OTHER; note = 2'-fluoro nucleotide
  modified_base 13: mod_base = OTHER; note = 2'-O-Methyl nucleotide
  modified_base 14: mod_base = OTHER; note = 2'-fluoro nucleotide
  modified_base 15: mod_base = OTHER; note = 2'-O-Methyl nucleotide
  modified_base 16: mod_base = OTHER; note = 2'-fluoro nucleotide
  modified_base 17: mod_base = OTHER; note = 2'-O-Methyl nucleotide
  modified_base 18: mod_base = OTHER; note = 2'-fluoro nucleotide
  modified_base 19: mod_base = OTHER; note = 2'-O-Methyl nucleotide
  modified_base 20: mod_base = OTHER; note = deoxy-thymine phosphorothioate
  misc_feature 1..19: note = RNA
  misc_feature 20..21: note = DNA
aaggcccttcgcacttctttt

SEQ ID NO: 1836 - DNA, 21 bp, synthetic construct
  misc_feature 1..21: note = Description of Artificial Sequence: Synthetic oligonucleotide
  source 1..21: mol_type = other DNA
  modified_base 1: mod_base = OTHER; note = 2'-O-Methyl nucleotide
  modified_base 2: mod_base = OTHER; note = 2'-O-Methyl nucleotide
  modified_base 3: mod_base = OTHER; note = 2'-fluoro nucleotide
  modified_base 4: mod_base = OTHER; note = 2'-O-Methyl nucleotide
  modified_base 5: mod_base = OTHER; note = 2'-fluoro nucleotide
  modified_base 6: mod_base = OTHER; note = 2'-O-Methyl nucleotide
  modified_base 7: mod_base = OTHER; note = 2'-fluoro nucleotide
  modified_base 8: mod_base = OTHER; note = 2'-O-Methyl nucleotide
  modified_base 9: mod_base = OTHER; note = 2'-fluoro nucleotide
  modified_base 10: mod_base = OTHER; note = 2'-O-Methyl nucleotide
  modified_base 11: mod_base = OTHER; note = 2'-fluoro nucleotide
  modified_base 12: mod_base = OTHER; note = 2'-O-Methyl nucleotide
  modified_base 13: mod_base = OTHER; note = 2'-fluoro nucleotide
  modified_base 14: mod_base = OTHER; note = 2'-O-Methyl nucleotide
  modified_base 15: mod_base = OTHER; note = 2'-fluoro nucleotide
  modified_base 16: mod_base = OTHER; note = 2'-O-Methyl nucleotide
  modified_base 17: mod_base = OTHER; note = 2'-fluoro nucleotide
  modified_base 18: mod_base = OTHER; note = 2'-O-Methyl nucleotide
  modified_base 19: mod_base = OTHER; note = 2'-fluoro nucleotide
  modified_base 20: mod_base = OTHER; note = deoxy-thymine phosphorothioate
  misc_feature 1..19: note = RNA
  misc_feature 20..21: note = DNA
agaagtgcgaagggccttgtt

SEQ ID NO: 1837 - DNA, 21 bp, synthetic construct
  misc_feature 1..21: note = Description of Artificial Sequence: Synthetic oligonucleotide
  source 1..21: mol_type = other DNA
  modified_base 1: mod_base = OTHER; note = 2'-fluoro nucleotide
  modified_base 2: mod_base = OTHER; note = 2'-fluoro nucleotide
  modified_base 3: mod_base = OTHER; note = 2'-O-Methyl nucleotide
  modified_base 4: mod_base = OTHER; note = 2'-fluoro nucleotide
  modified_base 5: mod_base = OTHER; note = 2'-O-Methyl nucleotide
  modified_base 6: mod_base = OTHER; note = 2'-fluoro nucleotide
  modified_base 7: mod_base = OTHER; note = 2'-O-Methyl nucleotide
  modified_base 8: mod_base = OTHER; note = 2'-fluoro nucleotide
  modified_base 9: mod_base = OTHER; note = 2'-O-Methyl nucleotide
  modified_base 10: mod_base = OTHER; note = 2'-fluoro nucleotide
  modified_base 11: mod_base = OTHER; note = 2'-O-Methyl nucleotide
  modified_base 12: mod_base = OTHER; note = 2'-fluoro nucleotide
  modified_base 13: mod_base = OTHER; note = 2'-O-Methyl nucleotide
  modified_base 14: mod_base = OTHER; note = 2'-fluoro nucleotide
  modified_base 15: mod_base = OTHER; note = 2'-O-Methyl nucleotide
  modified_base 16: mod_base = OTHER; note = 2'-fluoro nucleotide
  modified_base 17: mod_base = OTHER; note = 2'-O-Methyl nucleotide
  modified_base 18: mod_base = OTHER; note = 2'-fluoro nucleotide
  modified_base 19: mod_base = OTHER; note = 2'-O-Methyl nucleotide
  modified_base 20: mod_base = OTHER; note = deoxy-thymine phosphorothioate
  misc_feature 1..19: note = RNA
  misc_feature 20..21: note = DNA
caaggcccttcgcacttcttt

SEQ ID NO: 1838 - DNA, 21 bp, synthetic construct
  misc_feature 1..21: note = Description of Artificial Sequence: Synthetic oligonucleotide
  source 1..21: mol_type = other DNA
  modified_base 1: mod_base = OTHER; note = 2'-O-Methyl nucleotide
  modified_base 2: mod_base = OTHER; note = 2'-O-Methyl nucleotide
  modified_base 3: mod_base = OTHER; note = 2'-fluoro nucleotide
  modified_base 4: mod_base = OTHER; note = 2'-O-Methyl nucleotide
  modified_base 5: mod_base = OTHER; note = 2'-fluoro nucleotide
  modified_base 6: mod_base = OTHER; note = 2'-O-Methyl nucleotide
  modified_base 7: mod_base = OTHER; note = 2'-fluoro nucleotide
  modified_base 8: mod_base = OTHER; note = 2'-O-Methyl nucleotide
  modified_base 9: mod_base = OTHER; note = 2'-fluoro nucleotide
  modified_base 10: mod_base = OTHER; note = 2'-O-Methyl nucleotide
  modified_base 11: mod_base = OTHER; note = 2'-fluoro nucleotide
  modified_base 12: mod_base = OTHER; note = 2'-O-Methyl nucleotide
  modified_base 13: mod_base = OTHER; note = 2'-fluoro nucleotide
  modified_base 14: mod_base = OTHER; note = 2'-O-Methyl nucleotide
  modified_base 15: mod_base = OTHER; note = 2'-fluoro nucleotide
  modified_base 16: mod_base = OTHER; note = 2'-O-Methyl nucleotide
  modified_base 17: mod_base = OTHER; note = 2'-fluoro nucleotide
  modified_base 18: mod_base = OTHER; note = 2'-O-Methyl nucleotide
  modified_base 19: mod_base = OTHER; note = 2'-fluoro nucleotide
  modified_base 20: mod_base = OTHER; note = deoxy-thymine phosphorothioate
  misc_feature 1..19: note = RNA
  misc_feature 20..21: note = DNA
agtgcgaagggccttgccgtt

SEQ ID NO: 1839 - DNA, 21 bp, synthetic construct
  misc_feature 1..21: note = Description of Artificial Sequence: Synthetic oligonucleotide
  source 1..21: mol_type = other DNA
  modified_base 1: mod_base = OTHER; note = 2'-fluoro nucleotide
  modified_base 2: mod_base = OTHER; note = 2'-fluoro nucleotide
  modified_base 3: mod_base = OTHER; note = 2'-O-Methyl nucleotide
  modified_base 4: mod_base = OTHER; note = 2'-fluoro nucleotide
  modified_base 5: mod_base = OTHER; note = 2'-O-Methyl nucleotide
  modified_base 6: mod_base = OTHER; note = 2'-fluoro nucleotide
  modified_base 7: mod_base = OTHER; note = 2'-O-Methyl nucleotide
  modified_base 8: mod_base = OTHER; note = 2'-fluoro nucleotide
  modified_base 9: mod_base = OTHER; note = 2'-O-Methyl nucleotide
  modified_base 10: mod_base = OTHER; note = 2'-fluoro nucleotide
  modified_base 11: mod_base = OTHER; note = 2'-O-Methyl nucleotide
  modified_base 12: mod_base = OTHER; note = 2'-fluoro nucleotide
  modified_base 13: mod_base = OTHER; note = 2'-O-Methyl nucleotide
  modified_base 14: mod_base = OTHER; note = 2'-fluoro nucleotide
  modified_base 15: mod_base = OTHER; note = 2'-O-Methyl nucleotide
  modified_base 16: mod_base = OTHER; note = 2'-fluoro nucleotide
  modified_base 17: mod_base = OTHER; note = 2'-O-Methyl nucleotide
  modified_base 18: mod_base = OTHER; note = 2'-fluoro nucleotide
  modified_base 19: mod_base = OTHER; note = 2'-O-Methyl nucleotide
  modified_base 20: mod_base = OTHER; note = deoxy-thymine phosphorothioate
  misc_feature 1..19: note = RNA
  misc_feature 20..21: note = DNA
cggcaaggcccttcgcacttt

SEQ ID NO: 1840 - DNA, 21 bp, synthetic construct
  misc_feature 1..21: note = Description of Artificial Sequence: Synthetic oligonucleotide
  source 1..21: mol_type = other DNA
  modified_base 1: mod_base = OTHER; note = 2'-O-Methyl nucleotide
  modified_base 2: mod_base = OTHER; note = 2'-O-Methyl nucleotide
  modified_base 3: mod_base = OTHER; note = 2'-fluoro nucleotide
  modified_base 4: mod_base = OTHER; note = 2'-O-Methyl nucleotide
  modified_base 5: mod_base = OTHER; note = 2'-fluoro nucleotide
  modified_base 6: mod_base = OTHER; note = 2'-O-Methyl nucleotide
  modified_base 7: mod_base = OTHER; note = 2'-fluoro nucleotide
  modified_base 8: mod_base = OTHER; note = 2'-O-Methyl nucleotide
  modified_base 9: mod_base = OTHER; note = 2'-fluoro nucleotide
  modified_base 10: mod_base = OTHER; note = 2'-O-Methyl nucleotide
  modified_base 11: mod_base = OTHER; note = 2'-fluoro nucleotide
  modified_base 12: mod_base = OTHER; note = 2'-O-Methyl nucleotide
  modified_base 13: mod_base = OTHER; note = 2'-fluoro nucleotide
  modified_base 14: mod_base = OTHER; note = 2'-O-Methyl nucleotide
  modified_base 15: mod_base = OTHER; note = 2'-fluoro nucleotide
  modified_base 16: mod_base = OTHER; note = 2'-O-Methyl nucleotide
  modified_base 17: mod_base = OTHER; note = 2'-fluoro nucleotide
  modified_base 18: mod_base = OTHER; note = 2'-O-Methyl nucleotide
  modified_base 19: mod_base = OTHER; note = 2'-fluoro nucleotide
  modified_base 20: mod_base = OTHER; note = deoxy-thymine phosphorothioate
  misc_feature 1..19: note = RNA
  misc_feature 20..21: note = DNA
gtgcgaagggccttgccgctt

SEQ ID NO: 1841 - DNA, 21 bp, synthetic construct
  misc_feature 1..21: note = Description of Artificial Sequence: Synthetic oligonucleotide
  source 1..21: mol_type = other DNA
  modified_base 1: mod_base = OTHER; note = 2'-fluoro nucleotide
  modified_base 2: mod_base = OTHER; note = 2'-fluoro nucleotide
  modified_base 3: mod_base = OTHER; note = 2'-O-Methyl nucleotide
  modified_base 4: mod_base = OTHER; note = 2'-fluoro nucleotide
  modified_base 5: mod_base = OTHER; note = 2'-O-Methyl nucleotide
  modified_base 6: mod_base = OTHER; note = 2'-fluoro nucleotide
  modified_base 7: mod_base = OTHER; note = 2'-O-Methyl nucleotide
  modified_base 8: mod_base = OTHER; note = 2'-fluoro nucleotide
  modified_base 9: mod_base = OTHER; note = 2'-O-Methyl nucleotide
  modified_base 10: mod_base = OTHER; note = 2'-fluoro nucleotide
  modified_base 11: mod_base = OTHER; note = 2'-O-Methyl nucleotide
  modified_base 12: mod_base = OTHER; note = 2'-fluoro nucleotide
  modified_base 13: mod_base = OTHER; note = 2'-O-Methyl nucleotide
  modified_base 14: mod_base = OTHER; note = 2'-fluoro nucleotide
  modified_base 15: mod_base = OTHER; note = 2'-O-Methyl nucleotide
  modified_base 16: mod_base = OTHER; note = 2'-fluoro nucleotide
  modified_base 17: mod_base = OTHER; note = 2'-O-Methyl nucleotide
  modified_base 18: mod_base = OTHER; note = 2'-fluoro nucleotide
  modified_base 19: mod_base = OTHER; note = 2'-O-Methyl nucleotide
  modified_base 20: mod_base = OTHER; note = deoxy-thymine phosphorothioate
  misc_feature 1..19: note = RNA
  misc_feature 20..21: note = DNA
gcggcaaggcccttcgcactt

SEQ ID NO: 1842 - DNA, 21 bp, synthetic construct
  misc_feature 1..21: note = Description of Artificial Sequence: Synthetic oligonucleotide
  source 1..21: mol_type = other DNA
  modified_base 1: mod_base = OTHER; note = 2'-O-Methyl nucleotide
  modified_base 2: mod_base = OTHER; note = 2'-O-Methyl nucleotide
  modified_base 3: mod_base = OTHER; note = 2'-fluoro nucleotide
  modified_base 4: mod_base = OTHER; note = 2'-O-Methyl nucleotide
  modified_base 5: mod_base = OTHER; note = 2'-fluoro nucleotide
  modified_base 6: mod_base = OTHER; note = 2'-O-Methyl nucleotide
  modified_base 7: mod_base = OTHER; note = 2'-fluoro nucleotide
  modified_base 8: mod_base = OTHER; note = 2'-O-Methyl nucleotide
  modified_base 9: mod_base = OTHER; note = 2'-fluoro nucleotide
  modified_base 10: mod_base = OTHER; note = 2'-O-Methyl nucleotide
  modified_base 11: mod_base = OTHER; note = 2'-fluoro nucleotide
  modified_base 12: mod_base = OTHER; note = 2'-O-Methyl nucleotide
  modified_base 13: mod_base = OTHER; note = 2'-fluoro nucleotide
  modified_base 14: mod_base = OTHER; note = 2'-O-Methyl nucleotide
  modified_base 15: mod_base = OTHER; note = 2'-fluoro nucleotide
  modified_base 16: mod_base = OTHER; note = 2'-O-Methyl nucleotide
  modified_base 17: mod_base = OTHER; note = 2'-fluoro nucleotide
  modified_base 18: mod_base = OTHER; note = 2'-O-Methyl nucleotide
  modified_base 19: mod_base = OTHER; note = 2'-fluoro nucleotide
  modified_base 20: mod_base = OTHER; note = deoxy-thymine phosphorothioate
  misc_feature 1..19: note = RNA
  misc_feature 20..21: note = DNA
tgcgaagggccttgccgcatt

SEQ ID NO: 1843 - DNA, 21 bp, synthetic construct
  misc_feature 1..21: note = Description of Artificial Sequence: Synthetic oligonucleotide
  source 1..21: mol_type = other DNA
  modified_base 1: mod_base = OTHER; note = 2'-fluoro nucleotide
  modified_base 2: mod_base = OTHER; note = 2'-fluoro nucleotide
  modified_base 3: mod_base = OTHER; note = 2'-O-Methyl nucleotide
  modified_base 4: mod_base = OTHER; note = 2'-fluoro nucleotide
  modified_base 5: mod_base = OTHER; note = 2'-O-Methyl nucleotide
  modified_base 6: mod_base = OTHER; note = 2'-fluoro nucleotide
  modified_base 7: mod_base = OTHER; note = 2'-O-Methyl nucleotide
  modified_base 8: mod_base = OTHER; note = 2'-fluoro nucleotide
  modified_base 9: mod_base = OTHER; note = 2'-O-Methyl nucleotide
  modified_base 10: mod_base = OTHER; note = 2'-fluoro nucleotide
  modified_base 11: mod_base = OTHER; note = 2'-O-Methyl nucleotide
  modified_base 12: mod_base = OTHER; note = 2'-fluoro nucleotide
  modified_base 13: mod_base = OTHER; note = 2'-O-Methyl nucleotide
  modified_base 14: mod_base = OTHER; note = 2'-fluoro nucleotide
  modified_base 15: mod_base = OTHER; note = 2'-O-Methyl nucleotide
  modified_base 16: mod_base = OTHER; note = 2'-fluoro nucleotide
  modified_base 17: mod_base = OTHER; note = 2'-O-Methyl nucleotide
  modified_base 18: mod_base = OTHER; note = 2'-fluoro nucleotide
  modified_base 19: mod_base = OTHER; note = 2'-O-Methyl nucleotide
  modified_base 20: mod_base = OTHER; note = deoxy-thymine phosphorothioate
  misc_feature 1..19: note = RNA
  misc_feature 20..21: note = DNA
tgcggcaaggcccttcgcatt

SEQ ID NO: 1844 - DNA, 21 bp, synthetic construct
  misc_feature 1..21: note = Description of Artificial Sequence: Synthetic oligonucleotide
  source 1..21: mol_type = other DNA
  modified_base 1: mod_base = OTHER; note = 2'-O-Methyl nucleotide
  modified_base 2: mod_base = OTHER; note = 2'-O-Methyl nucleotide
  modified_base 3: mod_base = OTHER; note = 2'-fluoro nucleotide
  modified_base 4: mod_base = OTHER; note = 2'-O-Methyl nucleotide
  modified_base 5: mod_base = OTHER; note = 2'-fluoro nucleotide
  modified_base 6: mod_base = OTHER; note = 2'-O-Methyl nucleotide
  modified_base 7: mod_base = OTHER; note = 2'-fluoro nucleotide
  modified_base 8: mod_base = OTHER; note = 2'-O-Methyl nucleotide
  modified_base 9: mod_base = OTHER; note = 2'-fluoro nucleotide
  modified_base 10: mod_base = OTHER; note = 2'-O-Methyl nucleotide
  modified_base 11: mod_base = OTHER; note = 2'-fluoro nucleotide
  modified_base 12: mod_base = OTHER; note = 2'-O-Methyl nucleotide
  modified_base 13: mod_base = OTHER; note = 2'-fluoro nucleotide
  modified_base 14: mod_base = OTHER; note = 2'-O-Methyl nucleotide
  modified_base 15: mod_base = OTHER; note = 2'-fluoro nucleotide
  modified_base 16: mod_base = OTHER; note = 2'-O-Methyl nucleotide
  modified_base 17: mod_base = OTHER; note = 2'-fluoro nucleotide
  modified_base 18: mod_base = OTHER; note = 2'-O-Methyl nucleotide
  modified_base 19: mod_base = OTHER; note = 2'-fluoro nucleotide
  modified_base 20: mod_base = OTHER; note = deoxy-thymine phosphorothioate
  misc_feature 1..19: note = RNA
  misc_feature 20..21: note = DNA
gcgaagggccttgccgcaatt

SEQ ID NO: 1845 - DNA, 21 bp, synthetic construct
  misc_feature 1..21: note = Description of Artificial Sequence: Synthetic oligonucleotide
  source 1..21: mol_type = other DNA
  modified_base 1: mod_base = OTHER; note = 2'-fluoro nucleotide
  modified_base 2: mod_base = OTHER; note = 2'-fluoro nucleotide
  modified_base 3: mod_base = OTHER; note = 2'-O-Methyl nucleotide
  modified_base 4: mod_base = OTHER; note = 2'-fluoro nucleotide
  modified_base 5: mod_base = OTHER; note = 2'-O-Methyl nucleotide
  modified_base 6: mod_base = OTHER; note = 2'-fluoro nucleotide
  modified_base 7: mod_base = OTHER; note = 2'-O-Methyl nucleotide
  modified_base 8: mod_base = OTHER; note = 2'-fluoro nucleotide
  modified_base 9: mod_base = OTHER; note = 2'-O-Methyl nucleotide
  modified_base 10: mod_base = OTHER; note = 2'-fluoro nucleotide
  modified_base 11: mod_base = OTHER; note = 2'-O-Methyl nucleotide
  modified_base 12: mod_base = OTHER; note = 2'-fluoro nucleotide
  modified_base 13: mod_base = OTHER; note = 2'-O-Methyl nucleotide
  modified_base 14: mod_base = OTHER; note = 2'-fluoro nucleotide
  modified_base 15: mod_base = OTHER; note = 2'-O-Methyl nucleotide
  modified_base 16: mod_base = OTHER; note = 2'-fluoro nucleotide
  modified_base 17: mod_base = OTHER; note = 2'-O-Methyl nucleotide
  modified_base 18: mod_base = OTHER; note = 2'-fluoro nucleotide
  modified_base 19: mod_base = OTHER; note = 2'-O-Methyl nucleotide
  modified_base 20: mod_base = OTHER; note = deoxy-thymine phosphorothioate
  misc_feature 1..19: note = RNA
  misc_feature 20..21: note = DNA
ttgcggcaaggcccttcgctt

SEQ ID NO: 1846 - DNA, 21 bp, synthetic construct
  misc_feature 1..21: note = Description of Artificial Sequence: Synthetic oligonucleotide
  source 1..21: mol_type = other DNA
  modified_base 1: mod_base = OTHER; note = 2'-O-Methyl nucleotide
  modified_base 2: mod_base = OTHER; note = 2'-O-Methyl nucleotide
  modified_base 3: mod_base = OTHER; note = 2'-fluoro nucleotide
  modified_base 4: mod_base = OTHER; note = 2'-O-Methyl nucleotide
  modified_base 5: mod_base = OTHER; note = 2'-fluoro nucleotide
  modified_base 6: mod_base = OTHER; note = 2'-O-Methyl nucleotide
  modified_base 7: mod_base = OTHER; note = 2'-fluoro nucleotide
  modified_base 8: mod_base = OTHER; note = 2'-O-Methyl nucleotide
  modified_base 9: mod_base = OTHER; note = 2'-fluoro nucleotide
  modified_base 10: mod_base = OTHER; note = 2'-O-Methyl nucleotide
  modified_base 11: mod_base = OTHER; note = 2'-fluoro nucleotide
  modified_base 12: mod_base = OTHER; note = 2'-O-Methyl nucleotide
  modified_base 13: mod_base = OTHER; note = 2'-fluoro nucleotide
  modified_base 14: mod_base = OTHER; note = 2'-O-Methyl nucleotide
  modified_base 15: mod_base = OTHER; note = 2'-fluoro nucleotide
  modified_base 16: mod_base = OTHER; note = 2'-O-Methyl nucleotide
  modified_base 17: mod_base = OTHER; note = 2'-fluoro nucleotide
  modified_base 18: mod_base = OTHER; note = 2'-O-Methyl nucleotide
  modified_base 19: mod_base = OTHER; note = 2'-fluoro nucleotide
  modified_base 20: mod_base = OTHER; note = deoxy-thymine phosphorothioate
  misc_feature 1..19: note = RNA
  misc_feature 20..21: note = DNA
cgaagggccttgccgcaaatt

SEQ ID NO: 1847 - DNA, 21 bp, synthetic construct
  misc_feature 1..21: note = Description of Artificial Sequence: Synthetic oligonucleotide
  source 1..21: mol_type = other DNA
  modified_base 1: mod_base = OTHER; note = 2'-fluoro nucleotide
  modified_base 2: mod_base = OTHER; note = 2'-fluoro nucleotide
  modified_base 3: mod_base = OTHER; note = 2'-O-Methyl nucleotide
  modified_base 4: mod_base = OTHER; note = 2'-fluoro nucleotide
  modified_base 5: mod_base = OTHER; note = 2'-O-Methyl nucleotide
  modified_base 6: mod_base = OTHER; note = 2'-fluoro nucleotide
  modified_base 7: mod_base = OTHER; note = 2'-O-Methyl nucleotide
  modified_base 8: mod_base = OTHER; note = 2'-fluoro nucleotide
  modified_base 9: mod_base = OTHER; note = 2'-O-Methyl nucleotide
  modified_base 10: mod_base = OTHER; note = 2'-fluoro nucleotide
  modified_base 11: mod_base = OTHER; note = 2'-O-Methyl nucleotide
  modified_base 12: mod_base = OTHER; note = 2'-fluoro nucleotide
  modified_base 13: mod_base = OTHER; note = 2'-O-Methyl nucleotide
  modified_base 14: mod_base = OTHER; note = 2'-fluoro nucleotide
  modified_base 15: mod_base = OTHER; note = 2'-O-Methyl nucleotide
  modified_base 16: mod_base = OTHER; note = 2'-fluoro nucleotide
  modified_base 17: mod_base = OTHER; note = 2'-O-Methyl nucleotide
  modified_base 18: mod_base = OTHER; note = 2'-fluoro nucleotide
  modified_base 19: mod_base = OTHER; note = 2'-O-Methyl nucleotide
  modified_base 20: mod_base = OTHER; note = deoxy-thymine phosphorothioate
  misc_feature 1..19: note = RNA
  misc_feature 20..21: note = DNA
tttgcggcaaggcccttcgtt

SEQ ID NO: 1848 - DNA, 21 bp, synthetic construct
  misc_feature 1..21: note = Description of Artificial Sequence: Synthetic oligonucleotide
  source 1..21: mol_type = other DNA
  modified_base 1: mod_base = OTHER; note = 2'-O-Methyl nucleotide
  modified_base 2: mod_base = OTHER; note = 2'-O-Methyl nucleotide
  modified_base 3: mod_base = OTHER; note = 2'-fluoro nucleotide
  modified_base 4: mod_base = OTHER; note = 2'-O-Methyl nucleotide
  modified_base 5: mod_base = OTHER; note = 2'-fluoro nucleotide
  modified_base 6: mod_base = OTHER; note = 2'-O-Methyl nucleotide
  modified_base 7: mod_base = OTHER; note = 2'-fluoro nucleotide
  modified_base 8: mod_base = OTHER; note = 2'-O-Methyl nucleotide
  modified_base 9: mod_base = OTHER; note = 2'-fluoro nucleotide
  modified_base 10: mod_base = OTHER; note = 2'-O-Methyl nucleotide
  modified_base 11: mod_base = OTHER; note = 2'-fluoro nucleotide
  modified_base 12: mod_base = OTHER; note = 2'-O-Methyl nucleotide
  modified_base 13: mod_base = OTHER; note = 2'-fluoro nucleotide
  modified_base 14: mod_base = OTHER; note = 2'-O-Methyl nucleotide
  modified_base 15: mod_base = OTHER; note = 2'-fluoro nucleotide
  modified_base 16: mod_base = OTHER; note = 2'-O-Methyl nucleotide
  modified_base 17: mod_base = OTHER; note = 2'-fluoro nucleotide
  modified_base 18: mod_base = OTHER; note = 2'-O-Methyl nucleotide
  modified_base 19: mod_base = OTHER; note = 2'-fluoro nucleotide
  modified_base 20: mod_base = OTHER; note = deoxy-thymine phosphorothioate
  misc_feature 1..19: note = RNA
  misc_feature 20..21: note = DNA
aagggccttgccgcaaagttt

SEQ ID NO: 1849 - DNA, 21 bp, synthetic construct
  misc_feature 1..21: note = Description of Artificial Sequence: Synthetic oligonucleotide
  source 1..21: mol_type = other DNA
  modified_base 1: mod_base = OTHER; note = 2'-fluoro nucleotide
  modified_base 2: mod_base = OTHER; note = 2'-fluoro nucleotide
  modified_base 3: mod_base = OTHER; note = 2'-O-Methyl nucleotide
  modified_base 4: mod_base = OTHER; note = 2'-fluoro nucleotide
  modified_base 5: mod_base = OTHER; note = 2'-O-Methyl nucleotide
  modified_base 6: mod_base = OTHER; note = 2'-fluoro nucleotide
  modified_base 7: mod_base = OTHER; note = 2'-O-Methyl nucleotide
  modified_base 8: mod_base = OTHER; note = 2'-fluoro nucleotide
  modified_base 9: mod_base = OTHER; note = 2'-O-Methyl nucleotide
  modified_base 10: mod_base = OTHER; note = 2'-fluoro nucleotide
  modified_base 11: mod_base = OTHER; note = 2'-O-Methyl nucleotide
  modified_base 12: mod_base = OTHER; note = 2'-fluoro nucleotide
  modified_base 13: mod_base = OTHER; note = 2'-O-Methyl nucleotide
  modified_base 14: mod_base = OTHER; note = 2'-fluoro nucleotide
  modified_base 15: mod_base = OTHER; note = 2'-O-Methyl nucleotide
  modified_base 16: mod_base = OTHER; note = 2'-fluoro nucleotide
  modified_base 17: mod_base = OTHER; note = 2'-O-Methyl nucleotide
  modified_base 18: mod_base = OTHER; note = 2'-fluoro nucleotide
  modified_base 19: mod_base = OTHER; note = 2'-O-Methyl nucleotide
  modified_base 20: mod_base = OTHER; note = deoxy-thymine phosphorothioate
  misc_feature 1..19: note = RNA
  misc_feature 20..21: note = DNA
actttgcggcaaggccctttt

SEQ ID NO: 1850 - DNA, 21 bp, synthetic construct
  misc_feature 1..21: note = Description of Artificial Sequence: Synthetic oligonucleotide
  source 1..21: mol_type = other DNA
  modified_base 1: mod_base = OTHER; note = 2'-O-Methyl nucleotide
  modified_base 2: mod_base = OTHER; note = 2'-O-Methyl nucleotide
  modified_base 3: mod_base = OTHER; note = 2'-fluoro nucleotide
  modified_base 4: mod_base = OTHER; note = 2'-O-Methyl nucleotide
  modified_base 5: mod_base = OTHER; note = 2'-fluoro nucleotide
  modified_base 6: mod_base = OTHER; note = 2'-O-Methyl nucleotide
  modified_base 7: mod_base = OTHER; note = 2'-fluoro nucleotide
  modified_base 8: mod_base = OTHER; note = 2'-O-Methyl nucleotide
  modified_base 9: mod_base = OTHER; note = 2'-fluoro nucleotide
  modified_base 10: mod_base = OTHER; note = 2'-O-Methyl nucleotide
  modified_base 11: mod_base = OTHER; note = 2'-fluoro nucleotide
  modified_base 12: mod_base = OTHER; note = 2'-O-Methyl nucleotide
  modified_base 13: mod_base = OTHER; note = 2'-fluoro nucleotide
  modified_base 14: mod_base = OTHER; note = 2'-O-Methyl nucleotide
  modified_base 15: mod_base = OTHER; note = 2'-fluoro nucleotide
  modified_base 16: mod_base = OTHER; note = 2'-O-Methyl nucleotide
  modified_base 17: mod_base = OTHER; note = 2'-fluoro nucleotide
  modified_base 18: mod_base = OTHER; note = 2'-O-Methyl nucleotide
  modified_base 19: mod_base = OTHER; note = 2'-fluoro nucleotide
  modified_base 20: mod_base = OTHER; note = deoxy-thymine phosphorothioate
  misc_feature 1..19: note = RNA
  misc_feature 20..21: note = DNA
agggccttgccgcaaagtgtt

SEQ ID NO: 1851 - DNA, 21 bp, synthetic construct
  misc_feature 1..21: note = Description of Artificial Sequence: Synthetic oligonucleotide
  source 1..21: mol_type = other DNA
  modified_base 1: mod_base = OTHER; note = 2'-fluoro nucleotide
  modified_base 2: mod_base = OTHER; note = 2'-fluoro nucleotide
  modified_base 3: mod_base = OTHER; note = 2'-O-Methyl nucleotide
  modified_base 4: mod_base = OTHER; note = 2'-fluoro nucleotide
  modified_base 5: mod_base = OTHER; note = 2'-O-Methyl nucleotide
  modified_base 6: mod_base = OTHER; note = 2'-fluoro nucleotide
  modified_base 7: mod_base = OTHER; note = 2'-O-Methyl nucleotide
  modified_base 8: mod_base = OTHER; note = 2'-fluoro nucleotide
  modified_base 9: mod_base = OTHER; note = 2'-O-Methyl nucleotide
  modified_base 10: mod_base = OTHER; note = 2'-fluoro nucleotide
  modified_base 11: mod_base = OTHER; note = 2'-O-Methyl nucleotide
  modified_base 12: mod_base = OTHER; note = 2'-fluoro nucleotide
  modified_base 13: mod_base = OTHER; note = 2'-O-Methyl nucleotide
  modified_base 14: mod_base = OTHER; note = 2'-fluoro nucleotide
  modified_base 15: mod_base = OTHER; note = 2'-O-Methyl nucleotide
  modified_base 16: mod_base = OTHER; note = 2'-fluoro nucleotide
  modified_base 17: mod_base = OTHER; note = 2'-O-Methyl nucleotide
  modified_base 18: mod_base = OTHER; note = 2'-fluoro nucleotide
  modified_base 19: mod_base = OTHER; note = 2'-O-Methyl nucleotide
  modified_base 20: mod_base = OTHER; note = deoxy-thymine phosphorothioate
  misc_feature 1..19: note = RNA
  misc_feature 20..21: note = DNA
cactttgcggcaaggcccttt

SEQ ID NO: 1852 - DNA, 21 bp, synthetic construct
  misc_feature 1..21: note = Description of Artificial Sequence: Synthetic oligonucleotide
  source 1..21: mol_type = other DNA
  modified_base 1: mod_base = OTHER; note = 2'-O-Methyl nucleotide
  modified_base 2: mod_base = OTHER; note = 2'-O-Methyl nucleotide
  modified_base 3: mod_base = OTHER; note = 2'-fluoro nucleotide
  modified_base 4: mod_base = OTHER; note = 2'-O-Methyl nucleotide
  modified_base 5: mod_base = OTHER; note = 2'-fluoro nucleotide
  modified_base 6: mod_base = OTHER; note = 2'-O-Methyl nucleotide
  modified_base 7: mod_base = OTHER; note = 2'-fluoro nucleotide
  modified_base 8: mod_base = OTHER; note = 2'-O-Methyl nucleotide
  modified_base 9: mod_base = OTHER; note = 2'-fluoro nucleotide
  modified_base 10: mod_base = OTHER; note = 2'-O-Methyl nucleotide
  modified_base 11: mod_base = OTHER; note = 2'-fluoro nucleotide
  modified_base 12: mod_base = OTHER; note = 2'-O-Methyl nucleotide
  modified_base 13: mod_base = OTHER; note = 2'-fluoro nucleotide
  modified_base 14: mod_base = OTHER; note = 2'-O-Methyl nucleotide
  modified_base 15: mod_base = OTHER; note = 2'-fluoro nucleotide
  modified_base 16: mod_base = OTHER; note = 2'-O-Methyl nucleotide
  modified_base 17: mod_base = OTHER; note = 2'-fluoro nucleotide
  modified_base 18: mod_base = OTHER; note = 2'-O-Methyl nucleotide
  modified_base 19: mod_base = OTHER; note = 2'-fluoro nucleotide
  modified_base 20: mod_base = OTHER; note = deoxy-thymine phosphorothioate
  misc_feature 1..19: note = RNA
  misc_feature 20..21: note = DNA
gggccttgccgcaaagtgttt

SEQ ID NO: 1853 - DNA, 21 bp, synthetic construct
  misc_feature 1..21: note = Description of Artificial Sequence: Synthetic oligonucleotide
  source 1..21: mol_type = other DNA
  modified_base 1: mod_base = OTHER; note = 2'-fluoro nucleotide
  modified_base 2: mod_base = OTHER; note = 2'-fluoro nucleotide
  modified_base 3: mod_base = OTHER; note = 2'-O-Methyl nucleotide
  modified_base 4: mod_base = OTHER; note = 2'-fluoro nucleotide
  modified_base 5: mod_base = OTHER; note = 2'-O-Methyl nucleotide
  modified_base 6: mod_base = OTHER; note = 2'-fluoro nucleotide
  modified_base 7: mod_base = OTHER; note = 2'-O-Methyl nucleotide
  modified_base 8: mod_base = OTHER; note = 2'-fluoro nucleotide
  modified_base 9: mod_base = OTHER; note = 2'-O-Methyl nucleotide
  modified_base 10: mod_base = OTHER; note = 2'-fluoro nucleotide
  modified_base 11: mod_base = OTHER; note = 2'-O-Methyl nucleotide
  modified_base 12: mod_base = OTHER; note = 2'-fluoro nucleotide
  modified_base 13: mod_base = OTHER; note = 2'-O-Methyl nucleotide
  modified_base 14: mod_base = OTHER; note = 2'-fluoro nucleotide
  modified_base 15: mod_base = OTHER; note = 2'-O-Methyl nucleotide
  modified_base 16: mod_base = OTHER; note = 2'-fluoro nucleotide
  modified_base 17: mod_base = OTHER; note = 2'-O-Methyl nucleotide
  modified_base 18: mod_base = OTHER; note = 2'-fluoro nucleotide
  modified_base 19: mod_base = OTHER; note = 2'-O-Methyl nucleotide
  modified_base 20: mod_base = OTHER; note = deoxy-thymine phosphorothioate
  misc_feature 1..19: note = RNA
  misc_feature 20..21: note = DNA
acactttgcggcaaggccctt

SEQ ID NO: 1854 - DNA, 21 bp, synthetic construct
  misc_feature 1..21: note = Description of Artificial Sequence: Synthetic oligonucleotide
  source 1..21: mol_type = other DNA
  modified_base 1: mod_base = OTHER; note = 2'-O-Methyl nucleotide
  modified_base 2: mod_base = OTHER; note = 2'-O-Methyl nucleotide
  modified_base 3: mod_base = OTHER; note = 2'-fluoro nucleotide
  modified_base 4: mod_base = OTHER; note = 2'-O-Methyl nucleotide
  modified_base 5: mod_base = OTHER; note = 2'-fluoro nucleotide
  modified_base 6: mod_base = OTHER; note = 2'-O-Methyl nucleotide
  modified_base 7: mod_base = OTHER; note = 2'-fluoro nucleotide
  modified_base 8: mod_base = OTHER; note = 2'-O-Methyl nucleotide
  modified_base 9: mod_base = OTHER; note = 2'-fluoro nucleotide
  modified_base 10: mod_base = OTHER; note = 2'-O-Methyl nucleotide
  modified_base 11: mod_base = OTHER; note = 2'-fluoro nucleotide
  modified_base 12: mod_base = OTHER; note = 2'-O-Methyl nucleotide
  modified_base 13: mod_base = OTHER; note = 2'-fluoro nucleotide
  modified_base 14: mod_base = OTHER; note = 2'-O-Methyl nucleotide
  modified_base 15: mod_base = OTHER; note = 2'-fluoro nucleotide
  modified_base 16: mod_base = OTHER; note = 2'-O-Methyl nucleotide
  modified_base 17: mod_base = OTHER; note = 2'-fluoro nucleotide
  modified_base 18: mod_base = OTHER; note = 2'-O-Methyl nucleotide
  modified_base 19: mod_base = OTHER; note = 2'-fluoro nucleotide
  modified_base 20: mod_base = OTHER; note = deoxy-thymine phosphorothioate
  misc_feature 1..19: note = RNA
  misc_feature 20..21: note = DNA
ggccttgccgcaaagtgtgtt

SEQ ID NO: 1855 - DNA, 21 bp, synthetic construct
  misc_feature 1..21: note = Description of Artificial Sequence: Synthetic oligonucleotide
  source 1..21: mol_type = other DNA
  modified_base 1: mod_base = OTHER; note = 2'-fluoro nucleotide
  modified_base 2: mod_base = OTHER; note = 2'-fluoro nucleotide
  modified_base 3: mod_base = OTHER; note = 2'-O-Methyl nucleotide
  modified_base 4: mod_base = OTHER; note = 2'-fluoro nucleotide
  modified_base 5: mod_base = OTHER; note = 2'-O-Methyl nucleotide
  modified_base 6: mod_base = OTHER; note = 2'-fluoro nucleotide
  modified_base 7: mod_base = OTHER; note = 2'-O-Methyl nucleotide
  modified_base 8: mod_base = OTHER; note = 2'-fluoro nucleotide
  modified_base 9: mod_base = OTHER; note = 2'-O-Methyl nucleotide
  modified_base 10: mod_base = OTHER; note = 2'-fluoro nucleotide
  modified_base 11: mod_base = OTHER; note = 2'-O-Methyl nucleotide
  modified_base 12: mod_base = OTHER; note = 2'-fluoro nucleotide
  modified_base 13: mod_base = OTHER; note = 2'-O-Methyl nucleotide
  modified_base 14: mod_base = OTHER; note = 2'-fluoro nucleotide
  modified_base 15: mod_base = OTHER; note = 2'-O-Methyl nucleotide
  modified_base 16: mod_base = OTHER; note = 2'-fluoro nucleotide
  modified_base 17: mod_base = OTHER; note = 2'-O-Methyl nucleotide
  modified_base 18: mod_base = OTHER; note = 2'-fluoro nucleotide
  modified_base 19: mod_base = OTHER; note = 2'-O-Methyl nucleotide
  modified_base 20: mod_base = OTHER; note = deoxy-thymine phosphorothioate
  misc_feature 1..19: note = RNA
  misc_feature 20..21: note = DNA
cacactttgcggcaaggcctt

SEQ ID NO: 1856 - DNA, 21 bp, synthetic construct
  misc_feature 1..21: note = Description of Artificial Sequence: Synthetic oligonucleotide
  source 1..21: mol_type = other DNA
  modified_base 1: mod_base = OTHER; note = 2'-O-Methyl nucleotide
  modified_base 2: mod_base = OTHER; note = 2'-O-Methyl nucleotide
  modified_base 3: mod_base = OTHER; note = 2'-fluoro nucleotide
  modified_base 4: mod_base = OTHER; note = 2'-O-Methyl nucleotide
  modified_base 5: mod_base = OTHER; note = 2'-fluoro nucleotide
  modified_base 6: mod_base = OTHER; note = 2'-O-Methyl nucleotide
  modified_base 7: mod_base = OTHER; note = 2'-fluoro nucleotide
  modified_base 8: mod_base = OTHER; note = 2'-O-Methyl nucleotide
  modified_base 9: mod_base = OTHER; note = 2'-fluoro nucleotide
  modified_base 10: mod_base = OTHER; note = 2'-O-Methyl nucleotide
  modified_base 11: mod_base = OTHER; note = 2'-fluoro nucleotide
  modified_base 12: mod_base = OTHER; note = 2'-O-Methyl nucleotide
  modified_base 13: mod_base = OTHER; note = 2'-fluoro nucleotide
  modified_base 14: mod_base = OTHER; note = 2'-O-Methyl nucleotide
  modified_base 15: mod_base = OTHER; note = 2'-fluoro nucleotide
  modified_base 16: mod_base = OTHER; note = 2'-O-Methyl nucleotide
  modified_base 17: mod_base = OTHER; note = 2'-fluoro nucleotide
  modified_base 18: mod_base = OTHER; note = 2'-O-Methyl nucleotide
  modified_base 19: mod_base = OTHER; note = 2'-fluoro nucleotide
  modified_base 20: mod_base = OTHER; note = deoxy-thymine phosphorothioate
  misc_feature 1..19: note = RNA
  misc_feature 20..21: note = DNA
gccttgccgcaaagtgtgttt

SEQ ID NO: 1857 - DNA, 21 bp, synthetic construct
  misc_feature 1..21: note = Description of Artificial Sequence: Synthetic oligonucleotide
  source 1..21: mol_type = other DNA
  modified_base 1: mod_base = OTHER; note = 2'-fluoro nucleotide
  modified_base 2: mod_base = OTHER; note = 2'-fluoro nucleotide
  modified_base 3: mod_base = OTHER; note = 2'-O-Methyl nucleotide
  modified_base 4: mod_base = OTHER; note = 2'-fluoro nucleotide
  modified_base 5: mod_base = OTHER; note = 2'-O-Methyl nucleotide
  modified_base 6: mod_base = OTHER; note = 2'-fluoro nucleotide
  modified_base 7: mod_base = OTHER; note = 2'-O-Methyl nucleotide
  modified_base 8: mod_base = OTHER; note = 2'-fluoro nucleotide
  modified_base 9: mod_base = OTHER; note = 2'-O-Methyl nucleotide
  modified_base 10: mod_base = OTHER; note = 2'-fluoro nucleotide
  modified_base 11: mod_base = OTHER; note = 2'-O-Methyl nucleotide
  modified_base 12: mod_base = OTHER; note = 2'-fluoro nucleotide
  modified_base 13: mod_base = OTHER; note = 2'-O-Methyl nucleotide
  modified_base 14: mod_base = OTHER; note = 2'-fluoro nucleotide
  modified_base 15: mod_base = OTHER; note = 2'-O-Methyl nucleotide
  modified_base 16: mod_base = OTHER; note = 2'-fluoro nucleotide
  modified_base 17: mod_base = OTHER; note = 2'-O-Methyl nucleotide
  modified_base 18: mod_base = OTHER; note = 2'-fluoro nucleotide
  modified_base 19: mod_base = OTHER; note = 2'-O-Methyl nucleotide
  modified_base 20: mod_base = OTHER; note = deoxy-thymine phosphorothioate
  misc_feature 1..19: note = RNA
  misc_feature 20..21: note = DNA
acacactttgcggcaaggctt

SEQ ID NO: 1858 - DNA, 21 bp, synthetic construct
  misc_feature 1..21: note = Description of Artificial Sequence: Synthetic oligonucleotide
  source 1..21: mol_type = other DNA
  modified_base 1: mod_base = OTHER; note = 2'-O-Methyl nucleotide
  modified_base 2: mod_base = OTHER; note = 2'-O-Methyl nucleotide
  modified_base 3: mod_base = OTHER; note = 2'-fluoro nucleotide
  modified_base 4: mod_base = OTHER; note = 2'-O-Methyl nucleotide
  modified_base 5: mod_base = OTHER; note = 2'-fluoro nucleotide
  modified_base 6: mod_base = OTHER; note = 2'-O-Methyl nucleotide
  modified_base 7: mod_base = OTHER; note = 2'-fluoro nucleotide
  modified_base 8: mod_base = OTHER; note = 2'-O-Methyl nucleotide
  modified_base 9: mod_base = OTHER; note = 2'-fluoro nucleotide
  modified_base 10: mod_base = OTHER; note = 2'-O-Methyl nucleotide
  modified_base 11: mod_base = OTHER; note = 2'-fluoro nucleotide
  modified_base 12: mod_base = OTHER; note = 2'-O-Methyl nucleotide
  modified_base 13: mod_base = OTHER; note = 2'-fluoro nucleotide
  modified_base 14: mod_base = OTHER; note = 2'-O-Methyl nucleotide
  modified_base 15: mod_base = OTHER; note = 2'-fluoro nucleotide
  modified_base 16: mod_base = OTHER; note = 2'-O-Methyl nucleotide
  modified_base 17: mod_base = OTHER; note = 2'-fluoro nucleotide
  modified_base 18: mod_base = OTHER; note = 2'-O-Methyl nucleotide
  modified_base 19: mod_base = OTHER; note = 2'-fluoro nucleotide
  modified_base 20: mod_base = OTHER; note = deoxy-thymine phosphorothioate
  misc_feature 1..19: note = RNA
  misc_feature 20..21: note = DNA
cttgccgcaaagtgtgtaatt

SEQ ID NO: 1859 - DNA, 21 bp, synthetic construct
  misc_feature 1..21: note = Description of Artificial Sequence: Synthetic oligonucleotide
  source 1..21: mol_type = other DNA
  modified_base 1: mod_base = OTHER; note = 2'-fluoro nucleotide
  modified_base 2: mod_base = OTHER; note = 2'-fluoro nucleotide
  modified_base 3: mod_base = OTHER; note = 2'-O-Methyl nucleotide
  modified_base 4: mod_base = OTHER; note = 2'-fluoro nucleotide
  modified_base 5: mod_base = OTHER; note = 2'-O-Methyl nucleotide
  modified_base 6: mod_base = OTHER; note = 2'-fluoro nucleotide
  modified_base 7: mod_base = OTHER; note = 2'-O-Methyl nucleotide
  modified_base 8: mod_base = OTHER; note = 2'-fluoro nucleotide
  modified_base 9: mod_base = OTHER; note = 2'-O-Methyl nucleotide
  modified_base 10: mod_base = OTHER; note = 2'-fluoro nucleotide
  modified_base 11: mod_base = OTHER; note = 2'-O-Methyl nucleotide
  modified_base 12: mod_base = OTHER; note = 2'-fluoro nucleotide
  modified_base 13: mod_base = OTHER; note = 2'-O-Methyl nucleotide
  modified_base 14: mod_base = OTHER; note = 2'-fluoro nucleotide
  modified_base 15: mod_base = OTHER; note = 2'-O-Methyl nucleotide
  modified_base 16: mod_base = OTHER; note = 2'-fluoro nucleotide
  modified_base 17: mod_base = OTHER; note = 2'-O-Methyl nucleotide
  modified_base 18: mod_base = OTHER; note = 2'-fluoro nucleotide
  modified_base 19: mod_base = OTHER; note = 2'-O-Methyl nucleotide
  modified_base 20: mod_base = OTHER; note = deoxy-thymine phosphorothioate
  misc_feature 1..19: note = RNA
  misc_feature 20..21: note = DNA
ttacacactttgcggcaagtt

SEQ ID NO: 1860 - DNA, 21 bp, synthetic construct
  misc_feature 1..21: note = Description of Artificial Sequence: Synthetic oligonucleotide
  source 1..21: mol_type = other DNA
  modified_base 1: mod_base = OTHER; note = 2'-O-Methyl nucleotide
  modified_base 2: mod_base = OTHER; note = 2'-O-Methyl nucleotide
  modified_base 3: mod_base = OTHER; note = 2'-fluoro nucleotide
  modified_base 4: mod_base = OTHER; note = 2'-O-Methyl nucleotide
  modified_base 5: mod_base = OTHER; note = 2'-fluoro nucleotide
  modified_base 6: mod_base = OTHER; note = 2'-O-Methyl nucleotide
  modified_base 7: mod_base = OTHER; note = 2'-fluoro nucleotide
  modified_base 8: mod_base = OTHER; note = 2'-O-Methyl nucleotide
  modified_base 9: mod_base = OTHER; note = 2'-fluoro nucleotide
  modified_base 10: mod_base = OTHER; note = 2'-O-Methyl nucleotide
  modified_base 11: mod_base = OTHER; note = 2'-fluoro nucleotide
  modified_base 12: mod_base = OTHER; note = 2'-O-Methyl nucleotide
  modified_base 13: mod_base = OTHER; note = 2'-fluoro nucleotide
  modified_base 14: mod_base = OTHER; note = 2'-O-Methyl nucleotide
  modified_base 15: mod_base = OTHER; note = 2'-fluoro nucleotide
  modified_base 16: mod_base = OTHER; note = 2'-O-Methyl nucleotide
  modified_base 17: mod_base = OTHER; note = 2'-fluoro nucleotide
  modified_base 18: mod_base = OTHER; note = 2'-O-Methyl nucleotide
  modified_base 19: mod_base = OTHER; note = 2'-fluoro nucleotide
  modified_base 20: mod_base = OTHER; note = deoxy-thymine phosphorothioate
  misc_feature 1..19: note = RNA
  misc_feature 20..21: note = DNA
ggaataggtattggtgaattt

SEQ ID NO: 1861 - DNA, 21 bp, synthetic construct
  misc_feature 1..21: note = Description of Artificial Sequence: Synthetic oligonucleotide
  source 1..21: mol_type = other DNA
  modified_base 1: mod_base = OTHER; note = 2'-fluoro nucleotide
  modified_base 2: mod_base = OTHER; note = 2'-fluoro nucleotide
  modified_base 3: mod_base = OTHER; note = 2'-O-Methyl nucleotide
  modified_base 4: mod_base = OTHER; note = 2'-fluoro nucleotide
  modified_base 5: mod_base = OTHER; note = 2'-O-Methyl nucleotide
  modified_base 6: mod_base = OTHER; note = 2'-fluoro nucleotide
  modified_base 7: mod_base = OTHER; note = 2'-O-Methyl nucleotide
  modified_base 8: mod_base = OTHER; note = 2'-fluoro nucleotide
  modified_base 9: mod_base = OTHER; note = 2'-O-Methyl nucleotide
  modified_base 10: mod_base = OTHER; note = 2'-fluoro nucleotide
  modified_base 11: mod_base = OTHER; note = 2'-O-Methyl nucleotide
  modified_base 12: mod_base = OTHER; note = 2'-fluoro nucleotide
  modified_base 13: mod_base = OTHER; note = 2'-O-Methyl nucleotide
  modified_base 14: mod_base = OTHER; note = 2'-fluoro nucleotide
  modified_base 15: mod_base = OTHER; note = 2'-O-Methyl nucleotide
  modified_base 16: mod_base = OTHER; note = 2'-fluoro nucleotide
  modified_base 17: mod_base = OTHER; note = 2'-O-Methyl nucleotide
  modified_base 18: mod_base = OTHER; note = 2'-fluoro nucleotide
  modified_base 19: mod_base = OTHER; note = 2'-O-Methyl nucleotide
  modified_base 20: mod_base = OTHER; note = deoxy-thymine phosphorothioate
  misc_feature 1..19: note = RNA
  misc_feature 20..21: note = DNA
attcaccaatacctattcctt

SEQ ID NO: 1862 - DNA, 21 bp, synthetic construct
  misc_feature 1..21: note = Description of Artificial Sequence: Synthetic oligonucleotide
  source 1..21: mol_type = other DNA
  modified_base 1: mod_base = OTHER; note = 2'-O-Methyl nucleotide
  modified_base 2: mod_base = OTHER; note = 2'-O-Methyl nucleotide
  modified_base 3: mod_base = OTHER; note = 2'-fluoro nucleotide
  modified_base 4: mod_base = OTHER; note = 2'-O-Methyl nucleotide
  modified_base 5: mod_base = OTHER; note = 2'-fluoro nucleotide
  modified_base 6: mod_base = OTHER; note = 2'-O-Methyl nucleotide
  modified_base 7: mod_base = OTHER; note = 2'-fluoro nucleotide
  modified_base 8: mod_base = OTHER; note = 2'-O-Methyl nucleotide
  modified_base 9: mod_base = OTHER; note = 2'-fluoro nucleotide
  modified_base 10: mod_base = OTHER; note = 2'-O-Methyl nucleotide
  modified_base 11: mod_base = OTHER; note = 2'-fluoro nucleotide
  modified_base 12: mod_base = OTHER; note = 2'-O-Methyl nucleotide
  modified_base 13: mod_base = OTHER; note = 2'-fluoro nucleotide
  modified_base 14: mod_base = OTHER; note = 2'-O-Methyl nucleotide
  modified_base 15: mod_base = OTHER; note = 2'-fluoro nucleotide
  modified_base 16: mod_base = OTHER; note = 2'-O-Methyl nucleotide
  modified_base 17: mod_base = OTHER; note = 2'-fluoro nucleotide
  modified_base 18: mod_base = OTHER; note = 2'-O-Methyl nucleotide
  modified_base 19: mod_base = OTHER; note = 2'-fluoro nucleotide
  modified_base 20: mod_base = OTHER; note = deoxy-thymine phosphorothioate
  misc_feature 1..19: note = RNA
  misc_feature 20..21: note = DNA
gaataggtattggtgaatttt

SEQ ID NO: 1863 - DNA, 21 bp, synthetic construct
  misc_feature 1..21: note = Description of Artificial Sequence: Synthetic oligonucleotide
  source 1..21: mol_type = other DNA
  modified_base 1: mod_base = OTHER; note = 2'-fluoro nucleotide
  modified_base 2: mod_base = OTHER; note = 2'-fluoro nucleotide
  modified_base 3: mod_base = OTHER; note = 2'-O-Methyl nucleotide
  modified_base 4: mod_base = OTHER; note = 2'-fluoro nucleotide
  modified_base 5: mod_base = OTHER; note = 2'-O-Methyl nucleotide
  modified_base 6: mod_base = OTHER; note = 2'-fluoro nucleotide
  modified_base 7: mod_base = OTHER; note = 2'-O-Methyl nucleotide
  modified_base 8: mod_base = OTHER; note = 2'-fluoro nucleotide
  modified_base 9: mod_base = OTHER; note = 2'-O-Methyl nucleotide
  modified_base 10: mod_base = OTHER; note = 2'-fluoro nucleotide
  modified_base 11: mod_base = OTHER; note = 2'-O-Methyl nucleotide
  modified_base 12: mod_base = OTHER; note = 2'-fluoro nucleotide
  modified_base 13: mod_base = OTHER; note = 2'-O-Methyl nucleotide
  modified_base 14: mod_base = OTHER; note = 2'-fluoro nucleotide
  modified_base 15: mod_base = OTHER; note = 2'-O-Methyl nucleotide
  modified_base 16: mod_base = OTHER; note = 2'-fluoro nucleotide
  modified_base 17: mod_base = OTHER; note = 2'-O-Methyl nucleotide
  modified_base 18: mod_base = OTHER; note = 2'-fluoro nucleotide
  modified_base 19: mod_base = OTHER; note = 2'-O-Methyl nucleotide
  modified_base 20: mod_base = OTHER; note = deoxy-thymine phosphorothioate
  misc_feature 1..19: note = RNA
  misc_feature 20..21: note = DNA
aattcaccaatacctattctt

SEQ ID NO: 1864 - DNA, 21 bp, synthetic construct
  misc_feature 1..21: note = Description of Artificial Sequence: Synthetic oligonucleotide
  source 1..21: mol_type = other DNA
  modified_base 1: mod_base = OTHER; note = 2'-O-Methyl nucleotide
  modified_base 2: mod_base = OTHER; note = 2'-O-Methyl nucleotide
  modified_base 3: mod_base = OTHER; note = 2'-fluoro nucleotide
  modified_base 4: mod_base = OTHER; note = 2'-O-Methyl nucleotide
  modified_base 5: mod_base = OTHER; note = 2'-fluoro nucleotide
  modified_base 6: mod_base = OTHER; note = 2'-O-Methyl nucleotide
  modified_base 7: mod_base = OTHER; note = 2'-fluoro nucleotide
  modified_base 8: mod_base = OTHER; note = 2'-O-Methyl nucleotide
  modified_base 9: mod_base = OTHER; note = 2'-fluoro nucleotide
  modified_base 10: mod_base = OTHER; note = 2'-O-Methyl nucleotide
  modified_base 11: mod_base = OTHER; note = 2'-fluoro nucleotide
  modified_base 12: mod_base = OTHER; note = 2'-O-Methyl nucleotide
  modified_base 13: mod_base = OTHER; note = 2'-fluoro nucleotide
  modified_base 14: mod_base = OTHER; note = 2'-O-Methyl nucleotide
  modified_base 15: mod_base = OTHER; note = 2'-fluoro nucleotide
  modified_base 16: mod_base = OTHER; note = 2'-O-Methyl nucleotide
  modified_base 17: mod_base = OTHER; note = 2'-fluoro nucleotide
  modified_base 18: mod_base = OTHER; note = 2'-O-Methyl nucleotide
  modified_base 19: mod_base = OTHER; note = 2'-fluoro nucleotide
  modified_base 20: mod_base = OTHER; note = deoxy-thymine phosphorothioate
  misc_feature 1..19: note = RNA
  misc_feature 20..21: note = DNA
aataggtattggtgaattttt

SEQ ID NO: 1865 - DNA, 21 bp, synthetic construct
  misc_feature 1..21: note = Description of Artificial Sequence: Synthetic oligonucleotide
  source 1..21: mol_type = other DNA
  modified_base 1: mod_base = OTHER; note = 2'-fluoro nucleotide
  modified_base 2: mod_base = OTHER; note = 2'-fluoro nucleotide
  modified_base 3: mod_base = OTHER; note = 2'-O-Methyl nucleotide
  modified_base 4: mod_base = OTHER; note = 2'-fluoro nucleotide
  modified_base 5: mod_base = OTHER; note = 2'-O-Methyl nucleotide
  modified_base 6: mod_base = OTHER; note = 2'-fluoro nucleotide
  modified_base 7: mod_base = OTHER; note = 2'-O-Methyl nucleotide
  modified_base 8: mod_base = OTHER; note = 2'-fluoro nucleotide
  modified_base 9: mod_base = OTHER; note = 2'-O-Methyl nucleotide
  modified_base 10: mod_base = OTHER; note = 2'-fluoro nucleotide
  modified_base 11: mod_base = OTHER; note = 2'-O-Methyl nucleotide
  modified_base 12: mod_base = OTHER; note = 2'-fluoro nucleotide
  modified_base 13: mod_base = OTHER; note = 2'-O-Methyl nucleotide
  modified_base 14: mod_base = OTHER; note = 2'-fluoro nucleotide
  modified_base 15: mod_base = OTHER; note = 2'-O-Methyl nucleotide
  modified_base 16: mod_base = OTHER; note = 2'-fluoro nucleotide
  modified_base 17: mod_base = OTHER; note = 2'-O-Methyl nucleotide
  modified_base 18: mod_base = OTHER; note = 2'-fluoro nucleotide
  modified_base 19: mod_base = OTHER; note = 2'-O-Methyl nucleotide
  modified_base 20: mod_base = OTHER; note = deoxy-thymine phosphorothioate
  misc_feature 1..19: note = RNA
  misc_feature 20..21: note = DNA
aaattcaccaatacctatttt

SEQ ID NO: 1866 - DNA, 21 bp, synthetic construct
  misc_feature 1..21: note = Description of Artificial Sequence: Synthetic oligonucleotide
  source 1..21: mol_type = other DNA
  modified_base 1: mod_base = OTHER; note = 2'-O-Methyl nucleotide
  modified_base 2: mod_base = OTHER; note = 2'-O-Methyl nucleotide
  modified_base 3: mod_base = OTHER; note = 2'-fluoro nucleotide
  modified_base 4: mod_base = OTHER; note = 2'-O-Methyl nucleotide
  modified_base 5: mod_base = OTHER; note = 2'-fluoro nucleotide
  modified_base 6: mod_base = OTHER; note = 2'-O-Methyl nucleotide
  modified_base 7: mod_base = OTHER; note = 2'-fluoro nucleotide
  modified_base 8: mod_base = OTHER; note = 2'-O-Methyl nucleotide
  modified_base 9: mod_base = OTHER; note = 2'-fluoro nucleotide
  modified_base 10: mod_base = OTHER; note = 2'-O-Methyl nucleotide
  modified_base 11: mod_base = OTHER; note = 2'-fluoro nucleotide
  modified_base 12: mod_base = OTHER; note = 2'-O-Methyl nucleotide
  modified_base 13: mod_base = OTHER; note = 2'-fluoro nucleotide
  modified_base 14: mod_base = OTHER; note = 2'-O-Methyl nucleotide
  modified_base 15: mod_base = OTHER; note = 2'-fluoro nucleotide
  modified_base 16: mod_base = OTHER; note = 2'-O-Methyl nucleotide
  modified_base 17: mod_base = OTHER; note = 2'-fluoro nucleotide
  modified_base 18: mod_base = OTHER; note = 2'-O-Methyl nucleotide
  modified_base 19: mod_base = OTHER; note = 2'-fluoro nucleotide
  modified_base 20: mod_base = OTHER; note = deoxy-thymine phosphorothioate
  misc_feature 1..19: note = RNA
  misc_feature 20..21: note = DNA
ataggtattggtgaatttatt

SEQ ID NO: 1867 - DNA, 21 bp, synthetic construct
  misc_feature 1..21: note = Description of Artificial Sequence: Synthetic oligonucleotide
  source 1..21: mol_type = other DNA
  modified_base 1: mod_base = OTHER; note = 2'-fluoro nucleotide
  modified_base 2: mod_base = OTHER; note = 2'-fluoro nucleotide
  modified_base 3: mod_base = OTHER; note = 2'-O-Methyl nucleotide
  modified_base 4: mod_base = OTHER; note = 2'-fluoro nucleotide
  modified_base 5: mod_base = OTHER; note = 2'-O-Methyl nucleotide
  modified_base 6: mod_base = OTHER; note = 2'-fluoro nucleotide
  modified_base 7: mod_base = OTHER; note = 2'-O-Methyl nucleotide
  modified_base 8: mod_base = OTHER; note = 2'-fluoro nucleotide
  modified_base 9: mod_base = OTHER; note = 2'-O-Methyl nucleotide
  modified_base 10: mod_base = OTHER; note = 2'-fluoro nucleotide
  modified_base 11: mod_base = OTHER; note = 2'-O-Methyl nucleotide
  modified_base 12: mod_base = OTHER; note = 2'-fluoro nucleotide
  modified_base 13: mod_base = OTHER; note = 2'-O-Methyl nucleotide
  modified_base 14: mod_base = OTHER; note = 2'-fluoro nucleotide
  modified_base 15: mod_base = OTHER; note = 2'-O-Methyl nucleotide
  modified_base 16: mod_base = OTHER; note = 2'-fluoro nucleotide
  modified_base 17: mod_base = OTHER; note = 2'-O-Methyl nucleotide
  modified_base 18: mod_base = OTHER; note = 2'-fluoro nucleotide
  modified_base 19: mod_base = OTHER; note = 2'-O-Methyl nucleotide
  modified_base 20: mod_base = OTHER; note = deoxy-thymine phosphorothioate
  misc_feature 1..19: note = RNA
  misc_feature 20..21: note = DNA
taaattcaccaatacctattt

SEQ ID NO: 1868 - DNA, 21 bp, synthetic construct
  misc_feature 1..21: note = Description of Artificial Sequence: Synthetic oligonucleotide
  source 1..21: mol_type = other DNA
  modified_base 1: mod_base = OTHER; note = 2'-O-Methyl nucleotide
  modified_base 2: mod_base = OTHER; note = 2'-O-Methyl nucleotide
  modified_base 3: mod_base = OTHER; note = 2'-fluoro nucleotide
  modified_base 4: mod_base = OTHER; note = 2'-O-Methyl nucleotide
  modified_base 5: mod_base = OTHER; note = 2'-fluoro nucleotide
  modified_base 6: mod_base = OTHER; note = 2'-O-Methyl nucleotide
  modified_base 7: mod_base = OTHER; note = 2'-fluoro nucleotide
  modified_base 8: mod_base = OTHER; note = 2'-O-Methyl nucleotide
  modified_base 9: mod_base = OTHER; note = 2'-fluoro nucleotide
  modified_base 10: mod_base = OTHER; note = 2'-O-Methyl nucleotide
  modified_base 11: mod_base = OTHER; note = 2'-fluoro nucleotide
  modified_base 12: mod_base = OTHER; note = 2'-O-Methyl nucleotide
  modified_base 13: mod_base = OTHER; note = 2'-fluoro nucleotide
  modified_base 14: mod_base = OTHER; note = 2'-O-Methyl nucleotide
  modified_base 15: mod_base = OTHER; note = 2'-fluoro nucleotide
  modified_base 16: mod_base = OTHER; note = 2'-O-Methyl nucleotide
  modified_base 17: mod_base = OTHER; note = 2'-fluoro nucleotide
  modified_base 18: mod_base = OTHER; note = 2'-O-Methyl nucleotide
  modified_base 19: mod_base = OTHER; note = 2'-fluoro nucleotide
  modified_base 20: mod_base = OTHER; note = deoxy-thymine phosphorothioate
  misc_feature 1..19: note = RNA
  misc_feature 20..21: note = DNA
aggtattggtgaatttaaatt

SEQ ID NO: 1869 - DNA, 21 bp, synthetic construct
  misc_feature 1..21: note = Description of Artificial Sequence: Synthetic oligonucleotide
  source 1..21: mol_type = other DNA
  modified_base 1: mod_base = OTHER; note = 2'-fluoro nucleotide
  modified_base 2: mod_base = OTHER; note = 2'-fluoro nucleotide
  modified_base 3: mod_base = OTHER; note = 2'-O-Methyl nucleotide
  modified_base 4: mod_base = OTHER; note = 2'-fluoro nucleotide
  modified_base 5: mod_base = OTHER; note = 2'-O-Methyl nucleotide
  modified_base 6: mod_base = OTHER; note = 2'-fluoro nucleotide
  modified_base 7: mod_base = OTHER; note = 2'-O-Methyl nucleotide
  modified_base 8: mod_base = OTHER; note = 2'-fluoro nucleotide
  modified_base 9: mod_base = OTHER; note = 2'-O-Methyl nucleotide
  modified_base 10: mod_base = OTHER; note = 2'-fluoro nucleotide
  modified_base 11: mod_base = OTHER; note = 2'-O-Methyl nucleotide
  modified_base 12: mod_base = OTHER; note = 2'-fluoro nucleotide
  modified_base 13: mod_base = OTHER; note = 2'-O-Methyl nucleotide
  modified_base 14: mod_base = OTHER; note = 2'-fluoro nucleotide
  modified_base 15: mod_base = OTHER; note = 2'-O-Methyl nucleotide
  modified_base 16: mod_base = OTHER; note = 2'-fluoro nucleotide
  modified_base 17: mod_base = OTHER; note = 2'-O-Methyl nucleotide
  modified_base 18: mod_base = OTHER; note = 2'-fluoro nucleotide
  modified_base 19: mod_base = OTHER; note = 2'-O-Methyl nucleotide
  modified_base 20: mod_base = OTHER; note = deoxy-thymine phosphorothioate
  misc_feature 1..19: note = RNA
  misc_feature 20..21: note = DNA
tttaaattcaccaataccttt

SEQ ID NO: 1870 - DNA, 21 bp, synthetic construct
  misc_feature 1..21: note = Description of Artificial Sequence: Synthetic oligonucleotide
  source 1..21: mol_type = other DNA
  modified_base 1: mod_base = OTHER; note = 2'-O-Methyl nucleotide
  modified_base 2: mod_base = OTHER; note = 2'-O-Methyl nucleotide
  modified_base 3: mod_base = OTHER; note = 2'-fluoro nucleotide
  modified_base 4: mod_base = OTHER; note = 2'-O-Methyl nucleotide
  modified_base 5: mod_base = OTHER; note = 2'-fluoro nucleotide
  modified_base 6: mod_base = OTHER; note = 2'-O-Methyl nucleotide
  modified_base 7: mod_base = OTHER; note = 2'-fluoro nucleotide
  modified_base 8: mod_base = OTHER; note = 2'-O-Methyl nucleotide
  modified_base 9: mod_base = OTHER; note = 2'-fluoro nucleotide
  modified_base 10: mod_base = OTHER; note = 2'-O-Methyl nucleotide
  modified_base 11: mod_base = OTHER; note = 2'-fluoro nucleotide
  modified_base 12: mod_base = OTHER; note = 2'-O-Methyl nucleotide
  modified_base 13: mod_base = OTHER; note = 2'-fluoro nucleotide
  modified_base 14: mod_base = OTHER; note = 2'-O-Methyl nucleotide
  modified_base 15: mod_base = OTHER; note = 2'-fluoro nucleotide
  modified_base 16: mod_base = OTHER; note = 2'-O-Methyl nucleotide
  modified_base 17: mod_base = OTHER; note = 2'-fluoro nucleotide
  modified_base 18: mod_base = OTHER; note = 2'-O-Methyl nucleotide
  modified_base 19: mod_base = OTHER; note = 2'-fluoro nucleotide
  modified_base 20: mod_base = OTHER; note = deoxy-thymine phosphorothioate
  misc_feature 1..19: note = RNA
  misc_feature 20..21: note = DNA
ggtattggtgaatttaaagtt

SEQ ID NO: 1871 - DNA, 21 bp, synthetic construct
  misc_feature 1..21: note = Description of Artificial Sequence: Synthetic oligonucleotide
  source 1..21: mol_type = other DNA
  modified_base 1: mod_base = OTHER; note = 2'-fluoro nucleotide
  modified_base 2: mod_base = OTHER; note = 2'-fluoro nucleotide
  modified_base 3: mod_base = OTHER; note = 2'-O-Methyl nucleotide
  modified_base 4: mod_base = OTHER; note = 2'-fluoro nucleotide
  modified_base 5: mod_base = OTHER; note = 2'-O-Methyl nucleotide
  modified_base 6: mod_base = OTHER; note = 2'-fluoro nucleotide
  modified_base 7: mod_base = OTHER; note = 2'-O-Methyl nucleotide
  modified_base 8: mod_base = OTHER; note = 2'-fluoro nucleotide
  modified_base 9: mod_base = OTHER; note = 2'-O-Methyl nucleotide
  modified_base 10: mod_base = OTHER; note = 2'-fluoro nucleotide
  modified_base 11: mod_base = OTHER; note = 2'-O-Methyl nucleotide
  modified_base 12: mod_base = OTHER; note = 2'-fluoro nucleotide
  modified_base 13: mod_base = OTHER; note = 2'-O-Methyl nucleotide
  modified_base 14: mod_base = OTHER; note = 2'-fluoro nucleotide
  modified_base 15: mod_base = OTHER; note = 2'-O-Methyl nucleotide
  modified_base 16: mod_base = OTHER; note = 2'-fluoro nucleotide
  modified_base 17: mod_base = OTHER; note = 2'-O-Methyl nucleotide
  modified_base 18: mod_base = OTHER; note = 2'-fluoro nucleotide
  modified_base 19: mod_base = OTHER; note = 2'-O-Methyl nucleotide
  modified_base 20: mod_base = OTHER; note = deoxy-thymine phosphorothioate
  misc_feature 1..19: note = RNA
  misc_feature 20..21: note = DNA
ctttaaattcaccaatacctt

SEQ ID NO: 1872 - DNA, 21 bp, synthetic construct
  misc_feature 1..21: note = Description of Artificial Sequence: Synthetic oligonucleotide
  source 1..21: mol_type = other DNA
  modified_base 1: mod_base = OTHER; note = 2'-O-Methyl nucleotide
  modified_base 2: mod_base = OTHER; note = 2'-O-Methyl nucleotide
  modified_base 3: mod_base = OTHER; note = 2'-fluoro nucleotide
  modified_base 4: mod_base = OTHER; note = 2'-O-Methyl nucleotide
  modified_base 5: mod_base = OTHER; note = 2'-fluoro nucleotide
  modified_base 6: mod_base = OTHER; note = 2'-O-Methyl nucleotide
  modified_base 7: mod_base = OTHER; note = 2'-fluoro nucleotide
  modified_base 8: mod_base = OTHER; note = 2'-O-Methyl nucleotide
  modified_base 9: mod_base = OTHER; note = 2'-fluoro nucleotide
  modified_base 10: mod_base = OTHER; note = 2'-O-Methyl nucleotide
  modified_base 11: mod_base = OTHER; note = 2'-fluoro nucleotide
  modified_base 12: mod_base = OTHER; note = 2'-O-Methyl nucleotide
  modified_base 13: mod_base = OTHER; note = 2'-fluoro nucleotide
  modified_base 14: mod_base = OTHER; note = 2'-O-Methyl nucleotide
  modified_base 15: mod_base = OTHER; note = 2'-fluoro nucleotide
  modified_base 16: mod_base = OTHER; note = 2'-O-Methyl nucleotide
  modified_base 17: mod_base = OTHER; note = 2'-fluoro nucleotide
  modified_base 18: mod_base = OTHER; note = 2'-O-Methyl nucleotide
  modified_base 19: mod_base = OTHER; note = 2'-fluoro nucleotide
  modified_base 20: mod_base = OTHER; note = deoxy-thymine phosphorothioate
  misc_feature 1..19: note = RNA
  misc_feature 20..21: note = DNA
cactctccataaatgctactt

SEQ ID NO: 1873 - DNA, 21 bp, synthetic construct
  misc_feature 1..21: note = Description of Artificial Sequence: Synthetic oligonucleotide
  source 1..21: mol_type = other DNA
  modified_base 1: mod_base = OTHER; note = 2'-fluoro nucleotide
  modified_base 2: mod_base = OTHER; note = 2'-fluoro nucleotide
  modified_base 3: mod_base = OTHER; note = 2'-O-Methyl nucleotide
  modified_base 4: mod_base = OTHER; note = 2'-fluoro nucleotide
  modified_base 5: mod_base = OTHER; note = 2'-O-Methyl nucleotide
  modified_base 6: mod_base = OTHER; note = 2'-fluoro nucleotide
  modified_base 7: mod_base = OTHER; note = 2'-O-Methyl nucleotide
  modified_base 8: mod_base = OTHER; note = 2'-fluoro nucleotide
  modified_base 9: mod_base = OTHER; note = 2'-O-Methyl nucleotide
  modified_base 10: mod_base = OTHER; note = 2'-fluoro nucleotide
  modified_base 11: mod_base = OTHER; note = 2'-O-Methyl nucleotide
  modified_base 12: mod_base = OTHER; note = 2'-fluoro nucleotide
  modified_base 13: mod_base = OTHER; note = 2'-O-Methyl nucleotide
  modified_base 14: mod_base = OTHER; note = 2'-fluoro nucleotide
  modified_base 15: mod_base = OTHER; note = 2'-O-Methyl nucleotide
  modified_base 16: mod_base = OTHER; note = 2'-fluoro nucleotide
  modified_base 17: mod_base = OTHER; note = 2'-O-Methyl nucleotide
  modified_base 18: mod_base = OTHER; note = 2'-fluoro nucleotide
  modified_base 19: mod_base = OTHER; note = 2'-O-Methyl nucleotide
  modified_base 20: mod_base = OTHER; note = deoxy-thymine phosphorothioate
  misc_feature 1..19: note = RNA
  misc_feature 20..21: note = DNA
gtagcatttatggagagtgtt

SEQ ID NO: 1874 - DNA, 21 bp, synthetic construct
  misc_feature 1..21: note = Description of Artificial Sequence: Synthetic oligonucleotide
  source 1..21: mol_type = other DNA
  modified_base 1: mod_base = OTHER; note = 2'-O-Methyl nucleotide
  modified_base 2: mod_base = OTHER; note = 2'-O-Methyl nucleotide
  modified_base 3: mod_base = OTHER; note = 2'-fluoro nucleotide
  modified_base 4: mod_base = OTHER; note = 2'-O-Methyl nucleotide
  modified_base 5: mod_base = OTHER; note = 2'-fluoro nucleotide
  modified_base 6: mod_base = OTHER; note = 2'-O-Methyl nucleotide
  modified_base 7: mod_base = OTHER; note = 2'-fluoro nucleotide
  modified_base 8: mod_base = OTHER; note = 2'-O-Methyl nucleotide
  modified_base 9: mod_base = OTHER; note = 2'-fluoro nucleotide
  modified_base 10: mod_base = OTHER; note = 2'-O-Methyl nucleotide
  modified_base 11: mod_base = OTHER; note = 2'-fluoro nucleotide
  modified_base 12: mod_base = OTHER; note = 2'-O-Methyl nucleotide
  modified_base 13: mod_base = OTHER; note = 2'-fluoro nucleotide
  modified_base 14: mod_base = OTHER; note = 2'-O-Methyl nucleotide
  modified_base 15: mod_base = OTHER; note = 2'-fluoro nucleotide
  modified_base 16: mod_base = OTHER; note = 2'-O-Methyl nucleotide
  modified_base 17: mod_base = OTHER; note = 2'-fluoro nucleotide
  modified_base 18: mod_base = OTHER; note = 2'-O-Methyl nucleotide
  modified_base 19: mod_base = OTHER; note = 2'-fluoro nucleotide
  modified_base 20: mod_base = OTHER; note = deoxy-thymine phosphorothioate
  misc_feature 1..19: note = RNA
  misc_feature 20..21: note = DNA
ttaaacacttcaaaaactgtt

SEQ ID NO: 1875 - DNA, 21 bp, synthetic construct
  misc_feature 1..21: note = Description of Artificial Sequence: Synthetic oligonucleotide
  source 1..21: mol_type = other DNA
  modified_base 1: mod_base = OTHER; note = 2'-fluoro nucleotide
  modified_base 2: mod_base = OTHER; note = 2'-fluoro nucleotide
  modified_base 3: mod_base = OTHER; note = 2'-O-Methyl nucleotide
  modified_base 4: mod_base = OTHER; note = 2'-fluoro nucleotide
  modified_base 5: mod_base = OTHER; note = 2'-O-Methyl nucleotide
  modified_base 6: mod_base = OTHER; note = 2'-fluoro nucleotide
  modified_base 7: mod_base = OTHER; note = 2'-O-Methyl nucleotide
  modified_base 8: mod_base = OTHER; note = 2'-fluoro nucleotide
  modified_base 9: mod_base = OTHER; note = 2'-O-Methyl nucleotide
  modified_base 10: mod_base = OTHER; note = 2'-fluoro nucleotide
  modified_base 11: mod_base = OTHER; note = 2'-O-Methyl nucleotide
  modified_base 12: mod_base = OTHER; note = 2'-fluoro nucleotide
  modified_base 13: mod_base = OTHER; note = 2'-O-Methyl nucleotide
  modified_base 14: mod_base = OTHER; note = 2'-fluoro nucleotide
  modified_base 15: mod_base = OTHER; note = 2'-O-Methyl nucleotide
  modified_base 16: mod_base = OTHER; note = 2'-fluoro nucleotide
  modified_base 17: mod_base = OTHER; note = 2'-O-Methyl nucleotide
  modified_base 18: mod_base = OTHER; note = 2'-fluoro nucleotide
  modified_base 19: mod_base = OTHER; note = 2'-O-Methyl nucleotide
  modified_base 20: mod_base = OTHER; note = deoxy-thymine phosphorothioate
  misc_feature 1..19: note = RNA
  misc_feature 20..21: note = DNA
cagtttttgaagtgtttaatt

SEQ ID NO: 1876 - DNA, 21 bp, synthetic construct
  misc_feature 1..21: note = Description of Artificial Sequence: Synthetic oligonucleotide
  source 1..21: mol_type = other DNA
  modified_base 1: mod_base = OTHER; note = 2'-O-Methyl nucleotide
  modified_base 2: mod_base = OTHER; note = 2'-O-Methyl nucleotide
  modified_base 3: mod_base = OTHER; note = 2'-fluoro nucleotide
  modified_base 4: mod_base = OTHER; note = 2'-O-Methyl nucleotide
  modified_base 5: mod_base = OTHER; note = 2'-fluoro nucleotide
  modified_base 6: mod_base = OTHER; note = 2'-O-Methyl nucleotide
  modified_base 7: mod_base = OTHER; note = 2'-fluoro nucleotide
  modified_base 8: mod_base = OTHER; note = 2'-O-Methyl nucleotide
  modified_base 9: mod_base = OTHER; note = 2'-fluoro nucleotide
  modified_base 10: mod_base = OTHER; note = 2'-O-Methyl nucleotide
  modified_base 11: mod_base = OTHER; note = 2'-fluoro nucleotide
  modified_base 12: mod_base = OTHER; note = 2'-O-Methyl nucleotide
  modified_base 13: mod_base = OTHER; note = 2'-fluoro nucleotide
  modified_base 14: mod_base = OTHER; note = 2'-O-Methyl nucleotide
  modified_base 15: mod_base = OTHER; note = 2'-fluoro nucleotide
  modified_base 16: mod_base = OTHER; note = 2'-O-Methyl nucleotide
  modified_base 17: mod_base = OTHER; note = 2'-fluoro nucleotide
  modified_base 18: mod_base = OTHER; note = 2'-O-Methyl nucleotide
  modified_base 19: mod_base = OTHER; note = 2'-fluoro nucleotide
  modified_base 20: mod_base = OTHER; note = deoxy-thymine phosphorothioate
  misc_feature 1..19: note = RNA
  misc_feature 20..21: note = DNA
cttcaaaaactgcacctcctt

SEQ ID NO: 1877 - DNA, 21 bp, synthetic construct
  misc_feature 1..21: note = Description of Artificial Sequence: Synthetic oligonucleotide
  source 1..21: mol_type = other DNA
  modified_base 1: mod_base = OTHER; note = 2'-fluoro nucleotide
  modified_base 2: mod_base = OTHER; note = 2'-fluoro nucleotide
  modified_base 3: mod_base = OTHER; note = 2'-O-Methyl nucleotide
  modified_base 4: mod_base = OTHER; note = 2'-fluoro nucleotide
  modified_base 5: mod_base = OTHER; note = 2'-O-Methyl nucleotide
  modified_base 6: mod_base = OTHER; note = 2'-fluoro nucleotide
  modified_base 7: mod_base = OTHER; note = 2'-O-Methyl nucleotide
  modified_base 8: mod_base = OTHER; note = 2'-fluoro nucleotide
  modified_base 9: mod_base = OTHER; note = 2'-O-Methyl nucleotide
  modified_base 10: mod_base = OTHER; note = 2'-fluoro nucleotide
  modified_base 11: mod_base = OTHER; note = 2'-O-Methyl nucleotide
  modified_base 12: mod_base = OTHER; note = 2'-fluoro nucleotide
  modified_base 13: mod_base = OTHER; note = 2'-O-Methyl nucleotide
  modified_base 14: mod_base = OTHER; note = 2'-fluoro nucleotide
  modified_base 15: mod_base = OTHER; note = 2'-O-Methyl nucleotide
  modified_base 16: mod_base = OTHER; note = 2'-fluoro nucleotide
  modified_base 17: mod_base = OTHER; note = 2'-O-Methyl nucleotide
  modified_base 18: mod_base = OTHER; note = 2'-fluoro nucleotide
  modified_base 19: mod_base = OTHER; note = 2'-O-Methyl nucleotide
  modified_base 20: mod_base = OTHER; note = deoxy-thymine phosphorothioate
  misc_feature 1..19: note = RNA
  misc_feature 20..21: note = DNA
ggaggtgcagtttttgaagtt

SEQ ID NO: 1878 - DNA, 21 bp, synthetic construct
  misc_feature 1..21: note = Description of Artificial Sequence: Synthetic oligonucleotide
  source 1..21: mol_type = other DNA
  modified_base 1: mod_base = OTHER; note = 2'-O-Methyl nucleotide
  modified_base 2: mod_base = OTHER; note = 2'-O-Methyl nucleotide
  modified_base 3: mod_base = OTHER; note = 2'-fluoro nucleotide
  modified_base 4: mod_base = OTHER; note = 2'-O-Methyl nucleotide
  modified_base 5: mod_base = OTHER; note = 2'-fluoro nucleotide
  modified_base 6: mod_base = OTHER; note = 2'-O-Methyl nucleotide
  modified_base 7: mod_base = OTHER; note = 2'-fluoro nucleotide
  modified_base 8: mod_base = OTHER; note = 2'-O-Methyl nucleotide
  modified_base 9: mod_base = OTHER; note = 2'-fluoro nucleotide
  modified_base 10: mod_base = OTHER; note = 2'-O-Methyl nucleotide
  modified_base 11: mod_base = OTHER; note = 2'-fluoro nucleotide
  modified_base 12: mod_base = OTHER; note = 2'-O-Methyl nucleotide
  modified_base 13: mod_base = OTHER; note = 2'-fluoro nucleotide
  modified_base 14: mod_base = OTHER; note = 2'-O-Methyl nucleotide
  modified_base 15: mod_base = OTHER; note = 2'-fluoro nucleotide
  modified_base 16: mod_base = OTHER; note = 2'-O-Methyl nucleotide
  modified_base 17: mod_base = OTHER; note = 2'-fluoro nucleotide
  modified_base 18: mod_base = OTHER; note = 2'-O-Methyl nucleotide
  modified_base 19: mod_base = OTHER; note = 2'-fluoro nucleotide
  modified_base 20: mod_base = OTHER; note = deoxy-thymine phosphorothioate
  misc_feature 1..19: note = RNA
  misc_feature 20..21: note = DNA
ttcaaaaactgcacctccatt

SEQ ID NO: 1879 - DNA, 21 bp, synthetic construct
  misc_feature 1..21: note = Description of Artificial Sequence: Synthetic oligonucleotide
  source 1..21: mol_type = other DNA
  modified_base 1: mod_base = OTHER; note = 2'-fluoro nucleotide
  modified_base 2: mod_base = OTHER; note = 2'-fluoro nucleotide
  modified_base 3: mod_base = OTHER; note = 2'-O-Methyl nucleotide
  modified_base 4: mod_base = OTHER; note = 2'-fluoro nucleotide
  modified_base 5: mod_base = OTHER; note = 2'-O-Methyl nucleotide
  modified_base 6: mod_base = OTHER; note = 2'-fluoro nucleotide
  modified_base 7: mod_base = OTHER; note = 2'-O-Methyl nucleotide
  modified_base 8: mod_base = OTHER; note = 2'-fluoro nucleotide
  modified_base 9: mod_base = OTHER; note = 2'-O-Methyl nucleotide
  modified_base 10: mod_base = OTHER; note = 2'-fluoro nucleotide
  modified_base 11: mod_base = OTHER; note = 2'-O-Methyl nucleotide
  modified_base 12: mod_base = OTHER; note = 2'-fluoro nucleotide
  modified_base 13: mod_base = OTHER; note = 2'-O-Methyl nucleotide
  modified_base 14: mod_base = OTHER; note = 2'-fluoro nucleotide
  modified_base 15: mod_base = OTHER; note = 2'-O-Methyl nucleotide
  modified_base 16: mod_base = OTHER; note = 2'-fluoro nucleotide
  modified_base 17: mod_base = OTHER; note = 2'-O-Methyl nucleotide
  modified_base 18: mod_base = OTHER; note = 2'-fluoro nucleotide
  modified_base 19: mod_base = OTHER; note = 2'-O-Methyl nucleotide
  modified_base 20: mod_base = OTHER; note = deoxy-thymine phosphorothioate
  misc_feature 1..19: note = RNA
  misc_feature 20..21: note = DNA
tggaggtgcagtttttgaatt

SEQ ID NO: 1880 - DNA, 21 bp, synthetic construct
  misc_feature 1..21: note = Description of Artificial Sequence: Synthetic oligonucleotide
  source 1..21: mol_type = other DNA
  modified_base 1: mod_base = OTHER; note = 2'-O-Methyl nucleotide
  modified_base 2: mod_base = OTHER; note = 2'-O-Methyl nucleotide
  modified_base 3: mod_base = OTHER; note = 2'-fluoro nucleotide
  modified_base 4: mod_base = OTHER; note = 2'-O-Methyl nucleotide
  modified_base 5: mod_base = OTHER; note = 2'-fluoro nucleotide
  modified_base 6: mod_base = OTHER; note = 2'-O-Methyl nucleotide
  modified_base 7: mod_base = OTHER; note = 2'-fluoro nucleotide
  modified_base 8: mod_base = OTHER; note = 2'-O-Methyl nucleotide
  modified_base 9: mod_base = OTHER; note = 2'-fluoro nucleotide
  modified_base 10: mod_base = OTHER; note = 2'-O-Methyl nucleotide
  modified_base 11: mod_base = OTHER; note = 2'-fluoro nucleotide
  modified_base 12: mod_base = OTHER; note = 2'-O-Methyl nucleotide
  modified_base 13: mod_base = OTHER; note = 2'-fluoro nucleotide
  modified_base 14: mod_base = OTHER; note = 2'-O-Methyl nucleotide
  modified_base 15: mod_base = OTHER; note = 2'-fluoro nucleotide
  modified_base 16: mod_base = OTHER; note = 2'-O-Methyl nucleotide
  modified_base 17: mod_base = OTHER; note = 2'-fluoro nucleotide
  modified_base 18: mod_base = OTHER; note = 2'-O-Methyl nucleotide
  modified_base 19: mod_base = OTHER; note = 2'-fluoro nucleotide
  modified_base 20: mod_base = OTHER; note = deoxy-thymine phosphorothioate
  misc_feature 1..19: note = RNA
  misc_feature 20..21: note = DNA
tcaaaaactgcacctccattt

SEQ ID NO: 1881 - DNA, 21 bp, synthetic construct
  misc_feature 1..21: note = Description of Artificial Sequence: Synthetic oligonucleotide
  source 1..21: mol_type = other DNA
  modified_base 1: mod_base = OTHER; note = 2'-fluoro nucleotide
  modified_base 2: mod_base = OTHER; note = 2'-fluoro nucleotide
  modified_base 3: mod_base = OTHER; note = 2'-O-Methyl nucleotide
  modified_base 4: mod_base = OTHER; note = 2'-fluoro nucleotide
  modified_base 5: mod_base = OTHER; note = 2'-O-Methyl nucleotide
  modified_base 6: mod_base = OTHER; note = 2'-fluoro nucleotide
  modified_base 7: mod_base = OTHER; note = 2'-O-Methyl nucleotide
  modified_base 8: mod_base = OTHER; note = 2'-fluoro nucleotide
  modified_base 9: mod_base = OTHER; note = 2'-O-Methyl nucleotide
  modified_base 10: mod_base = OTHER; note = 2'-fluoro nucleotide
  modified_base 11: mod_base = OTHER; note = 2'-O-Methyl nucleotide
  modified_base 12: mod_base = OTHER; note = 2'-fluoro nucleotide
  modified_base 13: mod_base = OTHER; note = 2'-O-Methyl nucleotide
  modified_base 14: mod_base = OTHER; note = 2'-fluoro nucleotide
  modified_base 15: mod_base = OTHER; note = 2'-O-Methyl nucleotide
  modified_base 16: mod_base = OTHER; note = 2'-fluoro nucleotide
  modified_base 17: mod_base = OTHER; note = 2'-O-Methyl nucleotide
  modified_base 18: mod_base = OTHER; note = 2'-fluoro nucleotide
  modified_base 19: mod_base = OTHER; note = 2'-O-Methyl nucleotide
  modified_base 20: mod_base = OTHER; note = deoxy-thymine phosphorothioate
  misc_feature 1..19: note = RNA
  misc_feature 20..21: note = DNA
atggaggtgcagtttttgatt

SEQ ID NO: 1882 - DNA, 21 bp, synthetic construct
  misc_feature 1..21: note = Description of Artificial Sequence: Synthetic oligonucleotide
  source 1..21: mol_type = other DNA
  modified_base 1: mod_base = OTHER; note = 2'-O-Methyl nucleotide
  modified_base 2: mod_base = OTHER; note = 2'-O-Methyl nucleotide
  modified_base 3: mod_base = OTHER; note = 2'-fluoro nucleotide
  modified_base 4: mod_base = OTHER; note = 2'-O-Methyl nucleotide
  modified_base 5: mod_base = OTHER; note = 2'-fluoro nucleotide
  modified_base 6: mod_base = OTHER; note = 2'-O-Methyl nucleotide
  modified_base 7: mod_base = OTHER; note = 2'-fluoro nucleotide
  modified_base 8: mod_base = OTHER; note = 2'-O-Methyl nucleotide
  modified_base 9: mod_base = OTHER; note = 2'-fluoro nucleotide
  modified_base 10: mod_base = OTHER; note = 2'-O-Methyl nucleotide
  modified_base 11: mod_base = OTHER; note = 2'-fluoro nucleotide
  modified_base 12: mod_base = OTHER; note = 2'-O-Methyl nucleotide
  modified_base 13: mod_base = OTHER; note = 2'-fluoro nucleotide
  modified_base 14: mod_base = OTHER; note = 2'-O-Methyl nucleotide
  modified_base 15: mod_base = OTHER; note = 2'-fluoro nucleotide
  modified_base 16: mod_base = OTHER; note = 2'-O-Methyl nucleotide
  modified_base 17: mod_base = OTHER; note = 2'-fluoro nucleotide
  modified_base 18: mod_base = OTHER; note = 2'-O-Methyl nucleotide
  modified_base 19: mod_base = OTHER; note = 2'-fluoro nucleotide
  modified_base 20: mod_base = OTHER; note = deoxy-thymine phosphorothioate
  misc_feature 1..19: note = RNA
  misc_feature 20..21: note = DNA
caaaaactgcacctccatctt

SEQ ID NO: 1883 - DNA, 21 bp, synthetic construct
  misc_feature 1..21: note = Description of Artificial Sequence: Synthetic oligonucleotide
  source 1..21: mol_type = other DNA
  modified_base 1: mod_base = OTHER; note = 2'-fluoro nucleotide
  modified_base 2: mod_base = OTHER; note = 2'-fluoro nucleotide
  modified_base 3: mod_base = OTHER; note = 2'-O-Methyl nucleotide
  modified_base 4: mod_base = OTHER; note = 2'-fluoro nucleotide
  modified_base 5: mod_base = OTHER; note = 2'-O-Methyl nucleotide
  modified_base 6: mod_base = OTHER; note = 2'-fluoro nucleotide
  modified_base 7: mod_base = OTHER; note = 2'-O-Methyl nucleotide
  modified_base 8: mod_base = OTHER; note = 2'-fluoro nucleotide
  modified_base 9: mod_base = OTHER; note = 2'-O-Methyl nucleotide
  modified_base 10: mod_base = OTHER; note = 2'-fluoro nucleotide
  modified_base 11: mod_base = OTHER; note = 2'-O-Methyl nucleotide
  modified_base 12: mod_base = OTHER; note = 2'-fluoro nucleotide
  modified_base 13: mod_base = OTHER; note = 2'-O-Methyl nucleotide
  modified_base 14: mod_base = OTHER; note = 2'-fluoro nucleotide
  modified_base 15: mod_base = OTHER; note = 2'-O-Methyl nucleotide
  modified_base 16: mod_base = OTHER; note = 2'-fluoro nucleotide
  modified_base 17: mod_base = OTHER; note = 2'-O-Methyl nucleotide
  modified_base 18: mod_base = OTHER; note = 2'-fluoro nucleotide
  modified_base 19: mod_base = OTHER; note = 2'-O-Methyl nucleotide
  modified_base 20: mod_base = OTHER; note = deoxy-thymine phosphorothioate
  misc_feature 1..19: note = RNA
  misc_feature 20..21: note = DNA
gatggaggtgcagtttttgtt

SEQ ID NO: 1884 - DNA, 21 bp, synthetic construct
  misc_feature 1..21: note = Description of Artificial Sequence: Synthetic oligonucleotide
  source 1..21: mol_type = other DNA
  modified_base 1: mod_base = OTHER; note = 2'-O-Methyl nucleotide
  modified_base 2: mod_base = OTHER; note = 2'-O-Methyl nucleotide
  modified_base 3: mod_base = OTHER; note = 2'-fluoro nucleotide
  modified_base 4: mod_base = OTHER; note = 2'-O-Methyl nucleotide
  modified_base 5: mod_base = OTHER; note = 2'-fluoro nucleotide
  modified_base 6: mod_base = OTHER; note = 2'-O-Methyl nucleotide
  modified_base 7: mod_base = OTHER; note = 2'-fluoro nucleotide
  modified_base 8: mod_base = OTHER; note = 2'-O-Methyl nucleotide
  modified_base 9: mod_base = OTHER; note = 2'-fluoro nucleotide
  modified_base 10: mod_base = OTHER; note = 2'-O-Methyl nucleotide
  modified_base 11: mod_base = OTHER; note = 2'-fluoro nucleotide
  modified_base 12: mod_base = OTHER; note = 2'-O-Methyl nucleotide
  modified_base 13: mod_base = OTHER; note = 2'-fluoro nucleotide
  modified_base 14: mod_base = OTHER; note = 2'-O-Methyl nucleotide
  modified_base 15: mod_base = OTHER; note = 2'-fluoro nucleotide
  modified_base 16: mod_base = OTHER; note = 2'-O-Methyl nucleotide
  modified_base 17: mod_base = OTHER; note = 2'-fluoro nucleotide
  modified_base 18: mod_base = OTHER; note = 2'-O-Methyl nucleotide
  modified_base 19: mod_base = OTHER; note = 2'-fluoro nucleotide
  modified_base 20: mod_base = OTHER; note = deoxy-thymine phosphorothioate
  misc_feature 1..19: note = RNA
  misc_feature 20..21: note = DNA
aaaaactgcacctccatcatt

SEQ ID NO: 1885 - DNA, 21 bp, synthetic construct
  misc_feature 1..21: note = Description of Artificial Sequence: Synthetic oligonucleotide
  source 1..21: mol_type = other DNA
  modified_base 1: mod_base = OTHER; note = 2'-fluoro nucleotide
  modified_base 2: mod_base = OTHER; note = 2'-fluoro nucleotide
  modified_base 3: mod_base = OTHER; note = 2'-O-Methyl nucleotide
  modified_base 4: mod_base = OTHER; note = 2'-fluoro nucleotide
  modified_base 5: mod_base = OTHER; note = 2'-O-Methyl nucleotide
  modified_base 6: mod_base = OTHER; note = 2'-fluoro nucleotide
  modified_base 7: mod_base = OTHER; note = 2'-O-Methyl nucleotide
  modified_base 8: mod_base = OTHER; note = 2'-fluoro nucleotide
  modified_base 9: mod_base = OTHER; note = 2'-O-Methyl nucleotide
  modified_base 10: mod_base = OTHER; note = 2'-fluoro nucleotide
  modified_base 11: mod_base = OTHER; note = 2'-O-Methyl nucleotide
  modified_base 12: mod_base = OTHER; note = 2'-fluoro nucleotide
  modified_base 13: mod_base = OTHER; note = 2'-O-Methyl nucleotide
  modified_base 14: mod_base = OTHER; note = 2'-fluoro nucleotide
  modified_base 15: mod_base = OTHER; note = 2'-O-Methyl nucleotide
  modified_base 16: mod_base = OTHER; note = 2'-fluoro nucleotide
  modified_base 17: mod_base = OTHER; note = 2'-O-Methyl nucleotide
  modified_base 18: mod_base = OTHER; note = 2'-fluoro nucleotide
  modified_base 19: mod_base = OTHER; note = 2'-O-Methyl nucleotide
  modified_base 20: mod_base = OTHER; note = deoxy-thymine phosphorothioate
  misc_feature 1..19: note = RNA
  misc_feature 20..21: note = DNA
tgatggaggtgcagttttttt

SEQ ID NO: 1886 - DNA, 21 bp, synthetic construct
  misc_feature 1..21: note = Description of Artificial Sequence: Synthetic oligonucleotide
  source 1..21: mol_type = other DNA
  modified_base 1: mod_base = OTHER; note = 2'-O-Methyl nucleotide
  modified_base 2: mod_base = OTHER; note = 2'-O-Methyl nucleotide
  modified_base 3: mod_base = OTHER; note = 2'-fluoro nucleotide
  modified_base 4: mod_base = OTHER; note = 2'-O-Methyl nucleotide
  modified_base 5: mod_base = OTHER; note = 2'-fluoro nucleotide
  modified_base 6: mod_base = OTHER; note = 2'-O-Methyl nucleotide
  modified_base 7: mod_base = OTHER; note = 2'-fluoro nucleotide
  modified_base 8: mod_base = OTHER; note = 2'-O-Methyl nucleotide
  modified_base 9: mod_base = OTHER; note = 2'-fluoro nucleotide
  modified_base 10: mod_base = OTHER; note = 2'-O-Methyl nucleotide
  modified_base 11: mod_base = OTHER; note = 2'-fluoro nucleotide
  modified_base 12: mod_base = OTHER; note = 2'-O-Methyl nucleotide
  modified_base 13: mod_base = OTHER; note = 2'-fluoro nucleotide
  modified_base 14: mod_base = OTHER; note = 2'-O-Methyl nucleotide
  modified_base 15: mod_base = OTHER; note = 2'-fluoro nucleotide
  modified_base 16: mod_base = OTHER; note = 2'-O-Methyl nucleotide
  modified_base 17: mod_base = OTHER; note = 2'-fluoro nucleotide
  modified_base 18: mod_base = OTHER; note = 2'-O-Methyl nucleotide
  modified_base 19: mod_base = OTHER; note = 2'-fluoro nucleotide
  modified_base 20: mod_base = OTHER; note = deoxy-thymine phosphorothioate
  misc_feature 1..19: note = RNA
  misc_feature 20..21: note = DNA
actgcacctccatcagtggtt

SEQ ID NO: 1887 - DNA, 21 bp, synthetic construct
  misc_feature 1..21: note = Description of Artificial Sequence: Synthetic oligonucleotide
  source 1..21: mol_type = other DNA
  modified_base 1: mod_base = OTHER; note = 2'-fluoro nucleotide
  modified_base 2: mod_base = OTHER; note = 2'-fluoro nucleotide
  modified_base 3: mod_base = OTHER; note = 2'-O-Methyl nucleotide
  modified_base 4: mod_base = OTHER; note = 2'-fluoro nucleotide
  modified_base 5: mod_base = OTHER; note = 2'-O-Methyl nucleotide
  modified_base 6: mod_base = OTHER; note = 2'-fluoro nucleotide
  modified_base 7: mod_base = OTHER; note = 2'-O-Methyl nucleotide
  modified_base 8: mod_base = OTHER; note = 2'-fluoro nucleotide
  modified_base 9: mod_base = OTHER; note = 2'-O-Methyl nucleotide
  modified_base 10: mod_base = OTHER; note = 2'-fluoro nucleotide
  modified_base 11: mod_base = OTHER; note = 2'-O-Methyl nucleotide
  modified_base 12: mod_base = OTHER; note = 2'-fluoro nucleotide
  modified_base 13: mod_base = OTHER; note = 2'-O-Methyl nucleotide
  modified_base 14: mod_base = OTHER; note = 2'-fluoro nucleotide
  modified_base 15: mod_base = OTHER; note = 2'-O-Methyl nucleotide
  modified_base 16: mod_base = OTHER; note = 2'-fluoro nucleotide
  modified_base 17: mod_base = OTHER; note = 2'-O-Methyl nucleotide
  modified_base 18: mod_base = OTHER; note = 2'-fluoro nucleotide
  modified_base 19: mod_base = OTHER; note = 2'-O-Methyl nucleotide
  modified_base 20: mod_base = OTHER; note = deoxy-thymine phosphorothioate
  misc_feature 1..19: note = RNA
  misc_feature 20..21: note = DNA
ccactgatggaggtgcagttt

SEQ ID NO: 1888 - DNA, 21 bp, synthetic construct
  misc_feature 1..21: note = Description of Artificial Sequence: Synthetic oligonucleotide
  source 1..21: mol_type = other DNA
  modified_base 1: mod_base = OTHER; note = 2'-O-Methyl nucleotide
  modified_base 2: mod_base = OTHER; note = 2'-O-Methyl nucleotide
  modified_base 3: mod_base = OTHER; note = 2'-fluoro nucleotide
  modified_base 4: mod_base = OTHER; note = 2'-O-Methyl nucleotide
  modified_base 5: mod_base = OTHER; note = 2'-fluoro nucleotide
  modified_base 6: mod_base = OTHER; note = 2'-O-Methyl nucleotide
  modified_base 7: mod_base = OTHER; note = 2'-fluoro nucleotide
  modified_base 8: mod_base = OTHER; note = 2'-O-Methyl nucleotide
  modified_base 9: mod_base = OTHER; note = 2'-fluoro nucleotide
  modified_base 10: mod_base = OTHER; note = 2'-O-Methyl nucleotide
  modified_base 11: mod_base = OTHER; note = 2'-fluoro nucleotide
  modified_base 12: mod_base = OTHER; note = 2'-O-Methyl nucleotide
  modified_base 13: mod_base = OTHER; note = 2'-fluoro nucleotide
  modified_base 14: mod_base = OTHER; note = 2'-O-Methyl nucleotide
  modified_base 15: mod_base = OTHER; note = 2'-fluoro nucleotide
  modified_base 16: mod_base = OTHER; note = 2'-O-Methyl nucleotide
  modified_base 17: mod_base = OTHER; note = 2'-fluoro nucleotide
  modified_base 18: mod_base = OTHER; note = 2'-O-Methyl nucleotide
  modified_base 19: mod_base = OTHER; note = 2'-fluoro nucleotide
  modified_base 20: mod_base = OTHER; note = deoxy-thymine phosphorothioate
  misc_feature 1..19: note = RNA
  misc_feature 20..21: note = DNA
cacctccatcagtggcgattt

SEQ ID NO: 1889 - DNA, 21 bp, synthetic construct
  misc_feature 1..21: note = Description of Artificial Sequence: Synthetic oligonucleotide
  source 1..21: mol_type = other DNA
  modified_base 1: mod_base = OTHER; note = 2'-fluoro nucleotide
  modified_base 2: mod_base = OTHER; note = 2'-fluoro nucleotide
  modified_base 3: mod_base = OTHER; note = 2'-O-Methyl nucleotide
  modified_base 4: mod_base = OTHER; note = 2'-fluoro nucleotide
  modified_base 5: mod_base = OTHER; note = 2'-O-Methyl nucleotide
  modified_base 6: mod_base = OTHER; note = 2'-fluoro nucleotide
  modified_base 7: mod_base = OTHER; note = 2'-O-Methyl nucleotide
  modified_base 8: mod_base = OTHER; note = 2'-fluoro nucleotide
  modified_base 9: mod_base = OTHER; note = 2'-O-Methyl nucleotide
  modified_base 10: mod_base = OTHER; note = 2'-fluoro nucleotide
  modified_base 11: mod_base = OTHER; note = 2'-O-Methyl nucleotide
  modified_base 12: mod_base = OTHER; note = 2'-fluoro nucleotide
  modified_base 13: mod_base = OTHER; note = 2'-O-Methyl nucleotide
  modified_base 14: mod_base = OTHER; note = 2'-fluoro nucleotide
  modified_base 15: mod_base = OTHER; note = 2'-O-Methyl nucleotide
  modified_base 16: mod_base = OTHER; note = 2'-fluoro nucleotide
  modified_base 17: mod_base = OTHER; note = 2'-O-Methyl nucleotide
  modified_base 18: mod_base = OTHER; note = 2'-fluoro nucleotide
  modified_base 19: mod_base = OTHER; note = 2'-O-Methyl nucleotide
  modified_base 20: mod_base = OTHER; note = deoxy-thymine phosphorothioate
  misc_feature 1..19: note = RNA
  misc_feature 20..21: note = DNA
atcgccactgatggaggtgtt

SEQ ID NO: 1890 - DNA, 21 bp, synthetic construct
  misc_feature 1..21: note = Description of Artificial Sequence: Synthetic oligonucleotide
  source 1..21: mol_type = other DNA
  modified_base 1: mod_base = OTHER; note = 2'-O-Methyl nucleotide
  modified_base 2: mod_base = OTHER; note = 2'-O-Methyl nucleotide
  modified_base 3: mod_base = OTHER; note = 2'-fluoro nucleotide
  modified_base 4: mod_base = OTHER; note = 2'-O-Methyl nucleotide
  modified_base 5: mod_base = OTHER; note = 2'-fluoro nucleotide
  modified_base 6: mod_base = OTHER; note = 2'-O-Methyl nucleotide
  modified_base 7: mod_base = OTHER; note = 2'-fluoro nucleotide
  modified_base 8: mod_base = OTHER; note = 2'-O-Methyl nucleotide
  modified_base 9: mod_base = OTHER; note = 2'-fluoro nucleotide
  modified_base 10: mod_base = OTHER; note = 2'-O-Methyl nucleotide
  modified_base 11: mod_base = OTHER; note = 2'-fluoro nucleotide
  modified_base 12: mod_base = OTHER; note = 2'-O-Methyl nucleotide
  modified_base 13: mod_base = OTHER; note = 2'-fluoro nucleotide
  modified_base 14: mod_base = OTHER; note = 2'-O-Methyl nucleotide
  modified_base 15: mod_base = OTHER; note = 2'-fluoro nucleotide
  modified_base 16: mod_base = OTHER; note = 2'-O-Methyl nucleotide
  modified_base 17: mod_base = OTHER; note = 2'-fluoro nucleotide
  modified_base 18: mod_base = OTHER; note = 2'-O-Methyl nucleotide
  modified_base 19: mod_base = OTHER; note = 2'-fluoro nucleotide
  modified_base 20: mod_base = OTHER; note = deoxy-thymine phosphorothioate
  misc_feature 1..19: note = RNA
  misc_feature 20..21: note = DNA
acctccatcagtggcgatctt

SEQ ID NO: 1891 - DNA, 21 bp, synthetic construct
  misc_feature 1..21: note = Description of Artificial Sequence: Synthetic oligonucleotide
  source 1..21: mol_type = other DNA
  modified_base 1: mod_base = OTHER; note = 2'-fluoro nucleotide
  modified_base 2: mod_base = OTHER; note = 2'-fluoro nucleotide
  modified_base 3: mod_base = OTHER; note = 2'-O-Methyl nucleotide
  modified_base 4: mod_base = OTHER; note = 2'-fluoro nucleotide
  modified_base 5: mod_base = OTHER; note = 2'-O-Methyl nucleotide
  modified_base 6: mod_base = OTHER; note = 2'-fluoro nucleotide
  modified_base 7: mod_base = OTHER; note = 2'-O-Methyl nucleotide
  modified_base 8: mod_base = OTHER; note = 2'-fluoro nucleotide
  modified_base 9: mod_base = OTHER; note = 2'-O-Methyl nucleotide
  modified_base 10: mod_base = OTHER; note = 2'-fluoro nucleotide
  modified_base 11: mod_base = OTHER; note = 2'-O-Methyl nucleotide
  modified_base 12: mod_base = OTHER; note = 2'-fluoro nucleotide
  modified_base 13: mod_base = OTHER; note = 2'-O-Methyl nucleotide
  modified_base 14: mod_base = OTHER; note = 2'-fluoro nucleotide
  modified_base 15: mod_base = OTHER; note = 2'-O-Methyl nucleotide
  modified_base 16: mod_base = OTHER; note = 2'-fluoro nucleotide
  modified_base 17: mod_base = OTHER; note = 2'-O-Methyl nucleotide
  modified_base 18: mod_base = OTHER; note = 2'-fluoro nucleotide
  modified_base 19: mod_base = OTHER; note = 2'-O-Methyl nucleotide
  modified_base 20: mod_base = OTHER; note = deoxy-thymine phosphorothioate
  misc_feature 1..19: note = RNA
  misc_feature 20..21: note = DNA
gatcgccactgatggaggttt

SEQ ID NO: 1892 - DNA, 21 bp, synthetic construct
  misc_feature 1..21: note = Description of Artificial Sequence: Synthetic oligonucleotide
  source 1..21: mol_type = other DNA
  modified_base 1: mod_base = OTHER; note = 2'-O-Methyl nucleotide
  modified_base 2: mod_base = OTHER; note = 2'-O-Methyl nucleotide
  modified_base 3: mod_base = OTHER; note = 2'-fluoro nucleotide
  modified_base 4: mod_base = OTHER; note = 2'-O-Methyl nucleotide
  modified_base 5: mod_base = OTHER; note = 2'-fluoro nucleotide
  modified_base 6: mod_base = OTHER; note = 2'-O-Methyl nucleotide
  modified_base 7: mod_base = OTHER; note = 2'-fluoro nucleotide
  modified_base 8: mod_base = OTHER; note = 2'-O-Methyl nucleotide
  modified_base 9: mod_base = OTHER; note = 2'-fluoro nucleotide
  modified_base 10: mod_base = OTHER; note = 2'-O-Methyl nucleotide
  modified_base 11: mod_base = OTHER; note = 2'-fluoro nucleotide
  modified_base 12: mod_base = OTHER; note = 2'-O-Methyl nucleotide
  modified_base 13: mod_base = OTHER; note = 2'-fluoro nucleotide
  modified_base 14: mod_base = OTHER; note = 2'-O-Methyl nucleotide
  modified_base 15: mod_base = OTHER; note = 2'-fluoro nucleotide
  modified_base 16: mod_base = OTHER; note = 2'-O-Methyl nucleotide
  modified_base 17: mod_base = OTHER; note = 2'-fluoro nucleotide
  modified_base 18: mod_base = OTHER; note = 2'-O-Methyl nucleotide
  modified_base 19: mod_base = OTHER; note = 2'-fluoro nucleotide
  modified_base 20: mod_base = OTHER; note = deoxy-thymine phosphorothioate
  misc_feature 1..19: note = RNA
  misc_feature 20..21: note = DNA
ctccatcagtggcgatctctt

SEQ ID NO: 1893 - DNA, 21 bp, synthetic construct
  misc_feature 1..21: note = Description of Artificial Sequence: Synthetic oligonucleotide
  source 1..21: mol_type = other DNA
  modified_base 1: mod_base = OTHER; note = 2'-fluoro nucleotide
  modified_base 2: mod_base = OTHER; note = 2'-fluoro nucleotide
  modified_base 3: mod_base = OTHER; note = 2'-O-Methyl nucleotide
  modified_base 4: mod_base = OTHER; note = 2'-fluoro nucleotide
  modified_base 5: mod_base = OTHER; note = 2'-O-Methyl nucleotide
  modified_base 6: mod_base = OTHER; note = 2'-fluoro nucleotide
  modified_base 7: mod_base = OTHER; note = 2'-O-Methyl nucleotide
  modified_base 8: mod_base = OTHER; note = 2'-fluoro nucleotide
  modified_base 9: mod_base = OTHER; note = 2'-O-Methyl nucleotide
  modified_base 10: mod_base = OTHER; note = 2'-fluoro nucleotide
  modified_base 11: mod_base = OTHER; note = 2'-O-Methyl nucleotide
  modified_base 12: mod_base = OTHER; note = 2'-fluoro nucleotide
  modified_base 13: mod_base = OTHER; note = 2'-O-Methyl nucleotide
  modified_base 14: mod_base = OTHER; note = 2'-fluoro nucleotide
  modified_base 15: mod_base = OTHER; note = 2'-O-Methyl nucleotide
  modified_base 16: mod_base = OTHER; note = 2'-fluoro nucleotide
  modified_base 17: mod_base = OTHER; note = 2'-O-Methyl nucleotide
  modified_base 18: mod_base = OTHER; note = 2'-fluoro nucleotide
  modified_base 19: mod_base = OTHER; note = 2'-O-Methyl nucleotide
  modified_base 20: mod_base = OTHER; note = deoxy-thymine phosphorothioate
  misc_feature 1..19: note = RNA
  misc_feature 20..21: note = DNA
gagatcgccactgatggagtt

SEQ ID NO: 1894 - DNA, 21 bp, synthetic construct
  misc_feature 1..21: note = Description of Artificial Sequence: Synthetic oligonucleotide
  source 1..21: mol_type = other DNA
  modified_base 1: mod_base = OTHER; note = 2'-O-Methyl nucleotide
  modified_base 2: mod_base = OTHER; note = 2'-O-Methyl nucleotide
  modified_base 3: mod_base = OTHER; note = 2'-fluoro nucleotide
  modified_base 4: mod_base = OTHER; note = 2'-O-Methyl nucleotide
  modified_base 5: mod_base = OTHER; note = 2'-fluoro nucleotide
  modified_base 6: mod_base = OTHER; note = 2'-O-Methyl nucleotide
  modified_base 7: mod_base = OTHER; note = 2'-fluoro nucleotide
  modified_base 8: mod_base = OTHER; note = 2'-O-Methyl nucleotide
  modified_base 9: mod_base = OTHER; note = 2'-fluoro nucleotide
  modified_base 10: mod_base = OTHER; note = 2'-O-Methyl nucleotide
  modified_base 11: mod_base = OTHER; note = 2'-fluoro nucleotide
  modified_base 12: mod_base = OTHER; note = 2'-O-Methyl nucleotide
  modified_base 13: mod_base = OTHER; note = 2'-fluoro nucleotide
  modified_base 14: mod_base = OTHER; note = 2'-O-Methyl nucleotide
  modified_base 15: mod_base = OTHER; note = 2'-fluoro nucleotide
  modified_base 16: mod_base = OTHER; note = 2'-O-Methyl nucleotide
  modified_base 17: mod_base = OTHER; note = 2'-fluoro nucleotide
  modified_base 18: mod_base = OTHER; note = 2'-O-Methyl nucleotide
  modified_base 19: mod_base = OTHER; note = 2'-fluoro nucleotide
  modified_base 20: mod_base = OTHER; note = deoxy-thymine phosphorothioate
  misc_feature 1..19: note = RNA
  misc_feature 20..21: note = DNA
catcagtggcgatctccactt

SEQ ID NO: 1895 - DNA, 21 bp, synthetic construct
  misc_feature 1..21: note = Description of Artificial Sequence: Synthetic oligonucleotide
  source 1..21: mol_type = other DNA
  modified_base 1: mod_base = OTHER; note = 2'-fluoro nucleotide
  modified_base 2: mod_base = OTHER; note = 2'-fluoro nucleotide
  modified_base 3: mod_base = OTHER; note = 2'-O-Methyl nucleotide
  modified_base 4: mod_base = OTHER; note = 2'-fluoro nucleotide
  modified_base 5: mod_base = OTHER; note = 2'-O-Methyl nucleotide
  modified_base 6: mod_base = OTHER; note = 2'-fluoro nucleotide
  modified_base 7: mod_base = OTHER; note = 2'-O-Methyl nucleotide
  modified_base 8: mod_base = OTHER; note = 2'-fluoro nucleotide
  modified_base 9: mod_base = OTHER; note = 2'-O-Methyl nucleotide
  modified_base 10: mod_base = OTHER; note = 2'-fluoro nucleotide
  modified_base 11: mod_base = OTHER; note = 2'-O-Methyl nucleotide
  modified_base 12: mod_base = OTHER; note = 2'-fluoro nucleotide
  modified_base 13: mod_base = OTHER; note = 2'-O-Methyl nucleotide
  modified_base 14: mod_base = OTHER; note = 2'-fluoro nucleotide
  modified_base 15: mod_base = OTHER; note = 2'-O-Methyl nucleotide
  modified_base 16: mod_base = OTHER; note = 2'-fluoro nucleotide
  modified_base 17: mod_base = OTHER; note = 2'-O-Methyl nucleotide
  modified_base 18: mod_base = OTHER; note = 2'-fluoro nucleotide
  modified_base 19: mod_base = OTHER; note = 2'-O-Methyl nucleotide
  modified_base 20: mod_base = OTHER; note = deoxy-thymine phosphorothioate
  misc_feature 1..19: note = RNA
  misc_feature 20..21: note = DNA
gtggagatcgccactgatgtt

SEQ ID NO: 1896 - DNA, 21 bp, synthetic construct
  misc_feature 1..21: note = Description of Artificial Sequence: Synthetic oligonucleotide
  source 1..21: mol_type = other DNA
  modified_base 1: mod_base = OTHER; note = 2'-O-Methyl nucleotide
  modified_base 2: mod_base = OTHER; note = 2'-O-Methyl nucleotide
  modified_base 3: mod_base = OTHER; note = 2'-fluoro nucleotide
  modified_base 4: mod_base = OTHER; note = 2'-O-Methyl nucleotide
  modified_base 5: mod_base = OTHER; note = 2'-fluoro nucleotide
  modified_base 6: mod_base = OTHER; note = 2'-O-Methyl nucleotide
  modified_base 7: mod_base = OTHER; note = 2'-fluoro nucleotide
  modified_base 8: mod_base = OTHER; note = 2'-O-Methyl nucleotide
  modified_base 9: mod_base = OTHER; note = 2'-fluoro nucleotide
  modified_base 10: mod_base = OTHER; note = 2'-O-Methyl nucleotide
  modified_base 11: mod_base = OTHER; note = 2'-fluoro nucleotide
  modified_base 12: mod_base = OTHER; note = 2'-O-Methyl nucleotide
  modified_base 13: mod_base = OTHER; note = 2'-fluoro nucleotide
  modified_base 14: mod_base = OTHER; note = 2'-O-Methyl nucleotide
  modified_base 15: mod_base = OTHER; note = 2'-fluoro nucleotide
  modified_base 16: mod_base = OTHER; note = 2'-O-Methyl nucleotide
  modified_base 17: mod_base = OTHER; note = 2'-fluoro nucleotide
  modified_base 18: mod_base = OTHER; note = 2'-O-Methyl nucleotide
  modified_base 19: mod_base = OTHER; note = 2'-fluoro nucleotide
  modified_base 20: mod_base = OTHER; note = deoxy-thymine phosphorothioate
  misc_feature 1..19: note = RNA
  misc_feature 20..21: note = DNA
tggcgatctccacatcctgtt

SEQ ID NO: 1897 - DNA, 21 bp, synthetic construct
  misc_feature 1..21: note = Description of Artificial Sequence: Synthetic oligonucleotide
  source 1..21: mol_type = other DNA
  modified_base 1: mod_base = OTHER; note = 2'-fluoro nucleotide
  modified_base 2: mod_base = OTHER; note = 2'-fluoro nucleotide
  modified_base 3: mod_base = OTHER; note = 2'-O-Methyl nucleotide
  modified_base 4: mod_base = OTHER; note = 2'-fluoro nucleotide
  modified_base 5: mod_base = OTHER; note = 2'-O-Methyl nucleotide
  modified_base 6: mod_base = OTHER; note = 2'-fluoro nucleotide
  modified_base 7: mod_base = OTHER; note = 2'-O-Methyl nucleotide
  modified_base 8: mod_base = OTHER; note = 2'-fluoro nucleotide
  modified_base 9: mod_base = OTHER; note = 2'-O-Methyl nucleotide
  modified_base 10: mod_base = OTHER; note = 2'-fluoro nucleotide
  modified_base 11: mod_base = OTHER; note = 2'-O-Methyl nucleotide
  modified_base 12: mod_base = OTHER; note = 2'-fluoro nucleotide
  modified_base 13: mod_base = OTHER; note = 2'-O-Methyl nucleotide
  modified_base 14: mod_base = OTHER; note = 2'-fluoro nucleotide
  modified_base 15: mod_base = OTHER; note = 2'-O-Methyl nucleotide
  modified_base 16: mod_base = OTHER; note = 2'-fluoro nucleotide
  modified_base 17: mod_base = OTHER; note = 2'-O-Methyl nucleotide
  modified_base 18: mod_base = OTHER; note = 2'-fluoro nucleotide
  modified_base 19: mod_base = OTHER; note = 2'-O-Methyl nucleotide
  modified_base 20: mod_base = OTHER; note = deoxy-thymine phosphorothioate
  misc_feature 1..19: note = RNA
  misc_feature 20..21: note = DNA
caggatgtggagatcgccatt

SEQ ID NO: 1898 - DNA, 21 bp, synthetic construct
  misc_feature 1..21: note = Description of Artificial Sequence: Synthetic oligonucleotide
  source 1..21: mol_type = other DNA
  modified_base 1: mod_base = OTHER; note = 2'-O-Methyl nucleotide
  modified_base 2: mod_base = OTHER; note = 2'-O-Methyl nucleotide
  modified_base 3: mod_base = OTHER; note = 2'-fluoro nucleotide
  modified_base 4: mod_base = OTHER; note = 2'-O-Methyl nucleotide
  modified_base 5: mod_base = OTHER; note = 2'-fluoro nucleotide
  modified_base 6: mod_base = OTHER; note = 2'-O-Methyl nucleotide
  modified_base 7: mod_base = OTHER; note = 2'-fluoro nucleotide
  modified_base 8: mod_base = OTHER; note = 2'-O-Methyl nucleotide
  modified_base 9: mod_base = OTHER; note = 2'-fluoro nucleotide
  modified_base 10: mod_base = OTHER; note = 2'-O-Methyl nucleotide
  modified_base 11: mod_base = OTHER; note = 2'-fluoro nucleotide
  modified_base 12: mod_base = OTHER; note = 2'-O-Methyl nucleotide
  modified_base 13: mod_base = OTHER; note = 2'-fluoro nucleotide
  modified_base 14: mod_base = OTHER; note = 2'-O-Methyl nucleotide
  modified_base 15: mod_base = OTHER; note = 2'-fluoro nucleotide
  modified_base 16: mod_base = OTHER; note = 2'-O-Methyl nucleotide
  modified_base 17: mod_base = OTHER; note = 2'-fluoro nucleotide
  modified_base 18: mod_base = OTHER; note = 2'-O-Methyl nucleotide
  modified_base 19: mod_base = OTHER; note = 2'-fluoro nucleotide
  modified_base 20: mod_base = OTHER; note = deoxy-thymine phosphorothioate
  misc_feature 1..19: note = RNA
  misc_feature 20..21: note = DNA
ggcgatctccacatcctgctt

SEQ ID NO: 1899 - DNA, 21 bp, synthetic construct
  misc_feature 1..21: note = Description of Artificial Sequence: Synthetic oligonucleotide
  source 1..21: mol_type = other DNA
  modified_base 1: mod_base = OTHER; note = 2'-fluoro nucleotide
  modified_base 2: mod_base = OTHER; note = 2'-fluoro nucleotide
  modified_base 3: mod_base = OTHER; note = 2'-O-Methyl nucleotide
  modified_base 4: mod_base = OTHER; note = 2'-fluoro nucleotide
  modified_base 5: mod_base = OTHER; note = 2'-O-Methyl nucleotide
  modified_base 6: mod_base = OTHER; note = 2'-fluoro nucleotide
  modified_base 7: mod_base = OTHER; note = 2'-O-Methyl nucleotide
  modified_base 8: mod_base = OTHER; note = 2'-fluoro nucleotide
  modified_base 9: mod_base = OTHER; note = 2'-O-Methyl nucleotide
  modified_base 10: mod_base = OTHER; note = 2'-fluoro nucleotide
  modified_base 11: mod_base = OTHER; note = 2'-O-Methyl nucleotide
  modified_base 12: mod_base = OTHER; note = 2'-fluoro nucleotide
  modified_base 13: mod_base = OTHER; note = 2'-O-Methyl nucleotide
  modified_base 14: mod_base = OTHER; note = 2'-fluoro nucleotide
  modified_base 15: mod_base = OTHER; note = 2'-O-Methyl nucleotide
  modified_base 16: mod_base = OTHER; note = 2'-fluoro nucleotide
  modified_base 17: mod_base = OTHER; note = 2'-O-Methyl nucleotide
  modified_base 18: mod_base = OTHER; note = 2'-fluoro nucleotide
  modified_base 19: mod_base = OTHER; note = 2'-O-Methyl nucleotide
  modified_base 20: mod_base = OTHER; note = deoxy-thymine phosphorothioate
  misc_feature 1..19: note = RNA
  misc_feature 20..21: note = DNA
gcaggatgtggagatcgcctt

SEQ ID NO: 1900 - DNA, 21 bp, synthetic construct
  misc_feature 1..21: note = Description of Artificial Sequence: Synthetic oligonucleotide
  source 1..21: mol_type = other DNA
  modified_base 1: mod_base = OTHER; note = 2'-O-Methyl nucleotide
  modified_base 2: mod_base = OTHER; note = 2'-O-Methyl nucleotide
  modified_base 3: mod_base = OTHER; note = 2'-fluoro nucleotide
  modified_base 4: mod_base = OTHER; note = 2'-O-Methyl nucleotide
  modified_base 5: mod_base = OTHER; note = 2'-fluoro nucleotide
  modified_base 6: mod_base = OTHER; note = 2'-O-Methyl nucleotide
  modified_base 7: mod_base = OTHER; note = 2'-fluoro nucleotide
  modified_base 8: mod_base = OTHER; note = 2'-O-Methyl nucleotide
  modified_base 9: mod_base = OTHER; note = 2'-fluoro nucleotide
  modified_base 10: mod_base = OTHER; note = 2'-O-Methyl nucleotide
  modified_base 11: mod_base = OTHER; note = 2'-fluoro nucleotide
  modified_base 12: mod_base = OTHER; note = 2'-O-Methyl nucleotide
  modified_base 13: mod_base = OTHER; note = 2'-fluoro nucleotide
  modified_base 14: mod_base = OTHER; note = 2'-O-Methyl nucleotide
  modified_base 15: mod_base = OTHER; note = 2'-fluoro nucleotide
  modified_base 16: mod_base = OTHER; note = 2'-O-Methyl nucleotide
  modified_base 17: mod_base = OTHER; note = 2'-fluoro nucleotide
  modified_base 18: mod_base = OTHER; note = 2'-O-Methyl nucleotide
  modified_base 19: mod_base = OTHER; note = 2'-fluoro nucleotide
  modified_base 20: mod_base = OTHER; note = deoxy-thymine phosphorothioate
  misc_feature 1..19: note = RNA
  misc_feature 20..21: note = DNA
gcgatctccacatcctgcctt

SEQ ID NO: 1901 - DNA, 21 bp, synthetic construct
  misc_feature 1..21: note = Description of Artificial Sequence: Synthetic oligonucleotide
  source 1..21: mol_type = other DNA
  modified_base 1: mod_base = OTHER; note = 2'-fluoro nucleotide
  modified_base 2: mod_base = OTHER; note = 2'-fluoro nucleotide
  modified_base 3: mod_base = OTHER; note = 2'-O-Methyl nucleotide
  modified_base 4: mod_base = OTHER; note = 2'-fluoro nucleotide
  modified_base 5: mod_base = OTHER; note = 2'-O-Methyl nucleotide
  modified_base 6: mod_base = OTHER; note = 2'-fluoro nucleotide
  modified_base 7: mod_base = OTHER; note = 2'-O-Methyl nucleotide
  modified_base 8: mod_base = OTHER; note = 2'-fluoro nucleotide
  modified_base 9: mod_base = OTHER; note = 2'-O-Methyl nucleotide
  modified_base 10: mod_base = OTHER; note = 2'-fluoro nucleotide
  modified_base 11: mod_base = OTHER; note = 2'-O-Methyl nucleotide
  modified_base 12: mod_base = OTHER; note = 2'-fluoro nucleotide
  modified_base 13: mod_base = OTHER; note = 2'-O-Methyl nucleotide
  modified_base 14: mod_base = OTHER; note = 2'-fluoro nucleotide
  modified_base 15: mod_base = OTHER; note = 2'-O-Methyl nucleotide
  modified_base 16: mod_base = OTHER; note = 2'-fluoro nucleotide
  modified_base 17: mod_base = OTHER; note = 2'-O-Methyl nucleotide
  modified_base 18: mod_base = OTHER; note = 2'-fluoro nucleotide
  modified_base 19: mod_base = OTHER; note = 2'-O-Methyl nucleotide
  modified_base 20: mod_base = OTHER; note = deoxy-thymine phosphorothioate
  misc_feature 1..19: note = RNA
  misc_feature 20..21: note = DNA
ggcaggatgtggagatcgctt

SEQ ID NO: 1902 - DNA, 21 bp, synthetic construct
  misc_feature 1..21: note = Description of Artificial Sequence: Synthetic oligonucleotide
  source 1..21: mol_type = other DNA
  modified_base 1: mod_base = OTHER; note = 2'-O-Methyl nucleotide
  modified_base 2: mod_base = OTHER; note = 2'-O-Methyl nucleotide
  modified_base 3: mod_base = OTHER; note = 2'-fluoro nucleotide
  modified_base 4: mod_base = OTHER; note = 2'-O-Methyl nucleotide
  modified_base 5: mod_base = OTHER; note = 2'-fluoro nucleotide
  modified_base 6: mod_base = OTHER; note = 2'-O-Methyl nucleotide
  modified_base 7: mod_base = OTHER; note = 2'-fluoro nucleotide
  modified_base 8: mod_base = OTHER; note = 2'-O-Methyl nucleotide
  modified_base 9: mod_base = OTHER; note = 2'-fluoro nucleotide
  modified_base 10: mod_base = OTHER; note = 2'-O-Methyl nucleotide
  modified_base 11: mod_base = OTHER; note = 2'-fluoro nucleotide
  modified_base 12: mod_base = OTHER; note = 2'-O-Methyl nucleotide
  modified_base 13: mod_base = OTHER; note = 2'-fluoro nucleotide
  modified_base 14: mod_base = OTHER; note = 2'-O-Methyl nucleotide
  modified_base 15: mod_base = OTHER; note = 2'-fluoro nucleotide
  modified_base 16: mod_base = OTHER; note = 2'-O-Methyl nucleotide
  modified_base 17: mod_base = OTHER; note = 2'-fluoro nucleotide
  modified_base 18: mod_base = OTHER; note = 2'-O-Methyl nucleotide
  modified_base 19: mod_base = OTHER; note = 2'-fluoro nucleotide
  modified_base 20: mod_base = OTHER; note = deoxy-thymine phosphorothioate
  misc_feature 1..19: note = RNA
  misc_feature 20..21: note = DNA
cgatctccacatcctgccgtt

SEQ ID NO: 1903 - DNA, 21 bp, synthetic construct
  misc_feature 1..21: note = Description of Artificial Sequence: Synthetic oligonucleotide
  source 1..21: mol_type = other DNA
  modified_base 1: mod_base = OTHER; note = 2'-fluoro nucleotide
  modified_base 2: mod_base = OTHER; note = 2'-fluoro nucleotide
  modified_base 3: mod_base = OTHER; note = 2'-O-Methyl nucleotide
  modified_base 4: mod_base = OTHER; note = 2'-fluoro nucleotide
  modified_base 5: mod_base = OTHER; note = 2'-O-Methyl nucleotide
  modified_base 6: mod_base = OTHER; note = 2'-fluoro nucleotide
  modified_base 7: mod_base = OTHER; note = 2'-O-Methyl nucleotide
  modified_base 8: mod_base = OTHER; note = 2'-fluoro nucleotide
  modified_base 9: mod_base = OTHER; note = 2'-O-Methyl nucleotide
  modified_base 10: mod_base = OTHER; note = 2'-fluoro nucleotide
  modified_base 11: mod_base = OTHER; note = 2'-O-Methyl nucleotide
  modified_base 12: mod_base = OTHER; note = 2'-fluoro nucleotide
  modified_base 13: mod_base = OTHER; note = 2'-O-Methyl nucleotide
  modified_base 14: mod_base = OTHER; note = 2'-fluoro nucleotide
  modified_base 15: mod_base = OTHER; note = 2'-O-Methyl nucleotide
  modified_base 16: mod_base = OTHER; note = 2'-fluoro nucleotide
  modified_base 17: mod_base = OTHER; note = 2'-O-Methyl nucleotide
  modified_base 18: mod_base = OTHER; note = 2'-fluoro nucleotide
  modified_base 19: mod_base = OTHER; note = 2'-O-Methyl nucleotide
  modified_base 20: mod_base = OTHER; note = deoxy-thymine phosphorothioate
  misc_feature 1..19: note = RNA
  misc_feature 20..21: note = DNA
cggcaggatgtggagatcgtt

SEQ ID NO: 1904 - DNA, 21 bp, synthetic construct
  misc_feature 1..21: note = Description of Artificial Sequence: Synthetic oligonucleotide
  source 1..21: mol_type = other DNA
  modified_base 1: mod_base = OTHER; note = 2'-O-Methyl nucleotide
  modified_base 2: mod_base = OTHER; note = 2'-O-Methyl nucleotide
  modified_base 3: mod_base = OTHER; note = 2'-fluoro nucleotide
  modified_base 4: mod_base = OTHER; note = 2'-O-Methyl nucleotide
  modified_base 5: mod_base = OTHER; note = 2'-fluoro nucleotide
  modified_base 6: mod_base = OTHER; note = 2'-O-Methyl nucleotide
  modified_base 7: mod_base = OTHER; note = 2'-fluoro nucleotide
  modified_base 8: mod_base = OTHER; note = 2'-O-Methyl nucleotide
  modified_base 9: mod_base = OTHER; note = 2'-fluoro nucleotide
  modified_base 10: mod_base = OTHER; note = 2'-O-Methyl nucleotide
  modified_base 11: mod_base = OTHER; note = 2'-fluoro nucleotide
  modified_base 12: mod_base = OTHER; note = 2'-O-Methyl nucleotide
  modified_base 13: mod_base = OTHER; note = 2'-fluoro nucleotide
  modified_base 14: mod_base = OTHER; note = 2'-O-Methyl nucleotide
  modified_base 15: mod_base = OTHER; note = 2'-fluoro nucleotide
  modified_base 16: mod_base = OTHER; note = 2'-O-Methyl nucleotide
  modified_base 17: mod_base = OTHER; note = 2'-fluoro nucleotide
  modified_base 18: mod_base = OTHER; note = 2'-O-Methyl nucleotide
  modified_base 19: mod_base = OTHER; note = 2'-fluoro nucleotide
  modified_base 20: mod_base = OTHER; note = deoxy-thymine phosphorothioate
  misc_feature 1..19: note = RNA
  misc_feature 20..21: note = DNA
gatctccacatcctgccggtt

SEQ ID NO: 1905 - DNA, 21 bp, synthetic construct
  misc_feature 1..21: note = Description of Artificial Sequence: Synthetic oligonucleotide
  source 1..21: mol_type = other DNA
  modified_base 1: mod_base = OTHER; note = 2'-fluoro nucleotide
  modified_base 2: mod_base = OTHER; note = 2'-fluoro nucleotide
  modified_base 3: mod_base = OTHER; note = 2'-O-Methyl nucleotide
  modified_base 4: mod_base = OTHER; note = 2'-fluoro nucleotide
  modified_base 5: mod_base = OTHER; note = 2'-O-Methyl nucleotide
  modified_base 6: mod_base = OTHER; note = 2'-fluoro nucleotide
  modified_base 7: mod_base = OTHER; note = 2'-O-Methyl nucleotide
  modified_base 8: mod_base = OTHER; note = 2'-fluoro nucleotide
  modified_base 9: mod_base = OTHER; note = 2'-O-Methyl nucleotide
  modified_base 10: mod_base = OTHER; note = 2'-fluoro nucleotide
  modified_base 11: mod_base = OTHER; note = 2'-O-Methyl nucleotide
  modified_base 12: mod_base = OTHER; note = 2'-fluoro nucleotide
  modified_base 13: mod_base = OTHER; note = 2'-O-Methyl nucleotide
  modified_base 14: mod_base = OTHER; note = 2'-fluoro nucleotide
  modified_base 15: mod_base = OTHER; note = 2'-O-Methyl nucleotide
  modified_base 16: mod_base = OTHER; note = 2'-fluoro nucleotide
  modified_base 17: mod_base = OTHER; note = 2'-O-Methyl nucleotide
  modified_base 18: mod_base = OTHER; note = 2'-fluoro nucleotide
  modified_base 19: mod_base = OTHER; note = 2'-O-Methyl nucleotide
  modified_base 20: mod_base = OTHER; note = deoxy-thymine phosphorothioate
  misc_feature 1..19: note = RNA
  misc_feature 20..21: note = DNA
ccggcaggatgtggagatctt

SEQ ID NO: 1906 - DNA, 21 bp, synthetic construct
  misc_feature 1..21: note = Description of Artificial Sequence: Synthetic oligonucleotide
  source 1..21: mol_type = other DNA
  modified_base 1: mod_base = OTHER; note = 2'-O-Methyl nucleotide
  modified_base 2: mod_base = OTHER; note = 2'-O-Methyl nucleotide
  modified_base 3: mod_base = OTHER; note = 2'-fluoro nucleotide
  modified_base 4: mod_base = OTHER; note = 2'-O-Methyl nucleotide
  modified_base 5: mod_base = OTHER; note = 2'-fluoro nucleotide
  modified_base 6: mod_base = OTHER; note = 2'-O-Methyl nucleotide
  modified_base 7: mod_base = OTHER; note = 2'-fluoro nucleotide
  modified_base 8: mod_base = OTHER; note = 2'-O-Methyl nucleotide
  modified_base 9: mod_base = OTHER; note = 2'-fluoro nucleotide
  modified_base 10: mod_base = OTHER; note = 2'-O-Methyl nucleotide
  modified_base 11: mod_base = OTHER; note = 2'-fluoro nucleotide
  modified_base 12: mod_base = OTHER; note = 2'-O-Methyl nucleotide
  modified_base 13: mod_base = OTHER; note = 2'-fluoro nucleotide
  modified_base 14: mod_base = OTHER; note = 2'-O-Methyl nucleotide
  modified_base 15: mod_base = OTHER; note = 2'-fluoro nucleotide
  modified_base 16: mod_base = OTHER; note = 2'-O-Methyl nucleotide
  modified_base 17: mod_base = OTHER; note = 2'-fluoro nucleotide
  modified_base 18: mod_base = OTHER; note = 2'-O-Methyl nucleotide
  modified_base 19: mod_base = OTHER; note = 2'-fluoro nucleotide
  modified_base 20: mod_base = OTHER; note = deoxy-thymine phosphorothioate
  misc_feature 1..19: note = RNA
  misc_feature 20..21: note = DNA
ccacatcctgccggtggcatt

SEQ ID NO: 1907 - DNA, 21 bp, synthetic construct
  misc_feature 1..21: note = Description of Artificial Sequence: Synthetic oligonucleotide
  source 1..21: mol_type = other DNA
  modified_base 1: mod_base = OTHER; note = 2'-fluoro nucleotide
  modified_base 2: mod_base = OTHER; note = 2'-fluoro nucleotide
  modified_base 3: mod_base = OTHER; note = 2'-O-Methyl nucleotide
  modified_base 4: mod_base = OTHER; note = 2'-fluoro nucleotide
  modified_base 5: mod_base = OTHER; note = 2'-O-Methyl nucleotide
  modified_base 6: mod_base = OTHER; note = 2'-fluoro nucleotide
  modified_base 7: mod_base = OTHER; note = 2'-O-Methyl nucleotide
  modified_base 8: mod_base = OTHER; note = 2'-fluoro nucleotide
  modified_base 9: mod_base = OTHER; note = 2'-O-Methyl nucleotide
  modified_base 10: mod_base = OTHER; note = 2'-fluoro nucleotide
  modified_base 11: mod_base = OTHER; note = 2'-O-Methyl nucleotide
  modified_base 12: mod_base = OTHER; note = 2'-fluoro nucleotide
  modified_base 13: mod_base = OTHER; note = 2'-O-Methyl nucleotide
  modified_base 14: mod_base = OTHER; note = 2'-fluoro nucleotide
  modified_base 15: mod_base = OTHER; note = 2'-O-Methyl nucleotide
  modified_base 16: mod_base = OTHER; note = 2'-fluoro nucleotide
  modified_base 17: mod_base = OTHER; note = 2'-O-Methyl nucleotide
  modified_base 18: mod_base = OTHER; note = 2'-fluoro nucleotide
  modified_base 19: mod_base = OTHER; note = 2'-O-Methyl nucleotide
  modified_base 20: mod_base = OTHER; note = deoxy-thymine phosphorothioate
  misc_feature 1..19: note = RNA
  misc_feature 20..21: note = DNA
tgccaccggcaggatgtggtt

SEQ ID NO: 1908 - DNA, 21 bp, synthetic construct
  misc_feature 1..21: note = Description of Artificial Sequence: Synthetic oligonucleotide
  source 1..21: mol_type = other DNA
  modified_base 1: mod_base = OTHER; note = 2'-O-Methyl nucleotide
  modified_base 2: mod_base = OTHER; note = 2'-O-Methyl nucleotide
  modified_base 3: mod_base = OTHER; note = 2'-fluoro nucleotide
  modified_base 4: mod_base = OTHER; note = 2'-O-Methyl nucleotide
  modified_base 5: mod_base = OTHER; note = 2'-fluoro nucleotide
  modified_base 6: mod_base = OTHER; note = 2'-O-Methyl nucleotide
  modified_base 7: mod_base = OTHER; note = 2'-fluoro nucleotide
  modified_base 8: mod_base = OTHER; note = 2'-O-Methyl nucleotide
  modified_base 9: mod_base = OTHER; note = 2'-fluoro nucleotide
  modified_base 10: mod_base = OTHER; note = 2'-O-Methyl nucleotide
  modified_base 11: mod_base = OTHER; note = 2'-fluoro nucleotide
  modified_base 12: mod_base = OTHER; note = 2'-O-Methyl nucleotide
  modified_base 13: mod_base = OTHER; note = 2'-fluoro nucleotide
  modified_base 14: mod_base = OTHER; note = 2'-O-Methyl nucleotide
  modified_base 15: mod_base = OTHER; note = 2'-fluoro nucleotide
  modified_base 16: mod_base = OTHER; note = 2'-O-Methyl nucleotide
  modified_base 17: mod_base = OTHER; note = 2'-fluoro nucleotide
  modified_base 18: mod_base = OTHER; note = 2'-O-Methyl nucleotide
  modified_base 19: mod_base = OTHER; note = 2'-fluoro nucleotide
  modified_base 20: mod_base = OTHER; note = deoxy-thymine phosphorothioate
  misc_feature 1..19: note = RNA
  misc_feature 20..21: note = DNA
cacatcctgccggtggcattt

SEQ ID NO: 1909 - DNA, 21 bp, synthetic construct
  misc_feature 1..21: note = Description of Artificial Sequence: Synthetic oligonucleotide
  source 1..21: mol_type = other DNA
  modified_base 1: mod_base = OTHER; note = 2'-fluoro nucleotide
  modified_base 2: mod_base = OTHER; note = 2'-fluoro nucleotide
  modified_base 3: mod_base = OTHER; note = 2'-O-Methyl nucleotide
  modified_base 4: mod_base = OTHER; note = 2'-fluoro nucleotide
  modified_base 5: mod_base = OTHER; note = 2'-O-Methyl nucleotide
  modified_base 6: mod_base = OTHER; note = 2'-fluoro nucleotide
  modified_base 7: mod_base = OTHER; note = 2'-O-Methyl nucleotide
  modified_base 8: mod_base = OTHER; note = 2'-fluoro nucleotide
  modified_base 9: mod_base = OTHER; note = 2'-O-Methyl nucleotide
  modified_base 10: mod_base = OTHER; note = 2'-fluoro nucleotide
  modified_base 11: mod_base = OTHER; note = 2'-O-Methyl nucleotide
  modified_base 12: mod_base = OTHER; note = 2'-fluoro nucleotide
  modified_base 13: mod_base = OTHER; note = 2'-O-Methyl nucleotide
  modified_base 14: mod_base = OTHER; note = 2'-fluoro nucleotide
  modified_base 15: mod_base = OTHER; note = 2'-O-Methyl nucleotide
  modified_base 16: mod_base = OTHER; note = 2'-fluoro nucleotide
  modified_base 17: mod_base = OTHER; note = 2'-O-Methyl nucleotide
  modified_base 18: mod_base = OTHER; note = 2'-fluoro nucleotide
  modified_base 19: mod_base = OTHER; note = 2'-O-Methyl nucleotide
  modified_base 20: mod_base = OTHER; note = deoxy-thymine phosphorothioate
  misc_feature 1..19: note = RNA
  misc_feature 20..21: note = DNA
atgccaccggcaggatgtgtt

SEQ ID NO: 1910 - DNA, 21 bp, synthetic construct
  misc_feature 1..21: note = Description of Artificial Sequence: Synthetic oligonucleotide
  source 1..21: mol_type = other DNA
  modified_base 1: mod_base = OTHER; note = 2'-O-Methyl nucleotide
  modified_base 2: mod_base = OTHER; note = 2'-O-Methyl nucleotide
  modified_base 3: mod_base = OTHER; note = 2'-fluoro nucleotide
  modified_base 4: mod_base = OTHER; note = 2'-O-Methyl nucleotide
  modified_base 5: mod_base = OTHER; note = 2'-fluoro nucleotide
  modified_base 6: mod_base = OTHER; note = 2'-O-Methyl nucleotide
  modified_base 7: mod_base = OTHER; note = 2'-fluoro nucleotide
  modified_base 8: mod_base = OTHER; note = 2'-O-Methyl nucleotide
  modified_base 9: mod_base = OTHER; note = 2'-fluoro nucleotide
  modified_base 10: mod_base = OTHER; note = 2'-O-Methyl nucleotide
  modified_base 11: mod_base = OTHER; note = 2'-fluoro nucleotide
  modified_base 12: mod_base = OTHER; note = 2'-O-Methyl nucleotide
  modified_base 13: mod_base = OTHER; note = 2'-fluoro nucleotide
  modified_base 14: mod_base = OTHER; note = 2'-O-Methyl nucleotide
  modified_base 15: mod_base = OTHER; note = 2'-fluoro nucleotide
  modified_base 16: mod_base = OTHER; note = 2'-O-Methyl nucleotide
  modified_base 17: mod_base = OTHER; note = 2'-fluoro nucleotide
  modified_base 18: mod_base = OTHER; note = 2'-O-Methyl nucleotide
  modified_base 19: mod_base = OTHER; note = 2'-fluoro nucleotide
  modified_base 20: mod_base = OTHER; note = deoxy-thymine phosphorothioate
  misc_feature 1..19: note = RNA
  misc_feature 20..21: note = DNA
acatcctgccggtggcatttt

SEQ ID NO: 1911 - DNA, 21 bp, synthetic construct
  misc_feature 1..21: note = Description of Artificial Sequence: Synthetic oligonucleotide
  source 1..21: mol_type = other DNA
  modified_base 1: mod_base = OTHER; note = 2'-fluoro nucleotide
  modified_base 2: mod_base = OTHER; note = 2'-fluoro nucleotide
  modified_base 3: mod_base = OTHER; note = 2'-O-Methyl nucleotide
  modified_base 4: mod_base = OTHER; note = 2'-fluoro nucleotide
  modified_base 5: mod_base = OTHER; note = 2'-O-Methyl nucleotide
  modified_base 6: mod_base = OTHER; note = 2'-fluoro nucleotide
  modified_base 7: mod_base = OTHER; note = 2'-O-Methyl nucleotide
  modified_base 8: mod_base = OTHER; note = 2'-fluoro nucleotide
  modified_base 9: mod_base = OTHER; note = 2'-O-Methyl nucleotide
  modified_base 10: mod_base = OTHER; note = 2'-fluoro nucleotide
  modified_base 11: mod_base = OTHER; note = 2'-O-Methyl nucleotide
  modified_base 12: mod_base = OTHER; note = 2'-fluoro nucleotide
  modified_base 13: mod_base = OTHER; note = 2'-O-Methyl nucleotide
  modified_base 14: mod_base = OTHER; note = 2'-fluoro nucleotide
  modified_base 15: mod_base = OTHER; note = 2'-O-Methyl nucleotide
  modified_base 16: mod_base = OTHER; note = 2'-fluoro nucleotide
  modified_base 17: mod_base = OTHER; note = 2'-O-Methyl nucleotide
  modified_base 18: mod_base = OTHER; note = 2'-fluoro nucleotide
  modified_base 19: mod_base = OTHER; note = 2'-O-Methyl nucleotide
  modified_base 20: mod_base = OTHER; note = deoxy-thymine phosphorothioate
  misc_feature 1..19: note = RNA
  misc_feature 20..21: note = DNA
aatgccaccggcaggatgttt

SEQ ID NO: 1912 - DNA, 21 bp, synthetic construct
  misc_feature 1..21: note = Description of Artificial Sequence: Synthetic oligonucleotide
  source 1..21: mol_type = other DNA
  modified_base 1: mod_base = OTHER; note = 2'-O-Methyl nucleotide
  modified_base 2: mod_base = OTHER; note = 2'-O-Methyl nucleotide
  modified_base 3: mod_base = OTHER; note = 2'-fluoro nucleotide
  modified_base 4: mod_base = OTHER; note = 2'-O-Methyl nucleotide
  modified_base 5: mod_base = OTHER; note = 2'-fluoro nucleotide
  modified_base 6: mod_base = OTHER; note = 2'-O-Methyl nucleotide
  modified_base 7: mod_base = OTHER; note = 2'-fluoro nucleotide
  modified_base 8: mod_base = OTHER; note = 2'-O-Methyl nucleotide
  modified_base 9: mod_base = OTHER; note = 2'-fluoro nucleotide
  modified_base 10: mod_base = OTHER; note = 2'-O-Methyl nucleotide
  modified_base 11: mod_base = OTHER; note = 2'-fluoro nucleotide
  modified_base 12: mod_base = OTHER; note = 2'-O-Methyl nucleotide
  modified_base 13: mod_base = OTHER; note = 2'-fluoro nucleotide
  modified_base 14: mod_base = OTHER; note = 2'-O-Methyl nucleotide
  modified_base 15: mod_base = OTHER; note = 2'-fluoro nucleotide
  modified_base 16: mod_base = OTHER; note = 2'-O-Methyl nucleotide
  modified_base 17: mod_base = OTHER; note = 2'-fluoro nucleotide
  modified_base 18: mod_base = OTHER; note = 2'-O-Methyl nucleotide
  modified_base 19: mod_base = OTHER; note = 2'-fluoro nucleotide
  modified_base 20: mod_base = OTHER; note = deoxy-thymine phosphorothioate
  misc_feature 1..19: note = RNA
  misc_feature 20..21: note = DNA
atcctgccggtggcatttatt

SEQ ID NO: 1913 - DNA, 21 bp, synthetic construct
  misc_feature 1..21: note = Description of Artificial Sequence: Synthetic oligonucleotide
  source 1..21: mol_type = other DNA
  modified_base 1: mod_base = OTHER; note = 2'-fluoro nucleotide
  modified_base 2: mod_base = OTHER; note = 2'-fluoro nucleotide
  modified_base 3: mod_base = OTHER; note = 2'-O-Methyl nucleotide
  modified_base 4: mod_base = OTHER; note = 2'-fluoro nucleotide
  modified_base 5: mod_base = OTHER; note = 2'-O-Methyl nucleotide
  modified_base 6: mod_base = OTHER; note = 2'-fluoro nucleotide
  modified_base 7: mod_base = OTHER; note = 2'-O-Methyl nucleotide
  modified_base 8: mod_base = OTHER; note = 2'-fluoro nucleotide
  modified_base 9: mod_base = OTHER; note = 2'-O-Methyl nucleotide
  modified_base 10: mod_base = OTHER; note = 2'-fluoro nucleotide
  modified_base 11: mod_base = OTHER; note = 2'-O-Methyl nucleotide
  modified_base 12: mod_base = OTHER; note = 2'-fluoro nucleotide
  modified_base 13: mod_base = OTHER; note = 2'-O-Methyl nucleotide
  modified_base 14: mod_base = OTHER; note = 2'-fluoro nucleotide
  modified_base 15: mod_base = OTHER; note = 2'-O-Methyl nucleotide
  modified_base 16: mod_base = OTHER; note = 2'-fluoro nucleotide
  modified_base 17: mod_base = OTHER; note = 2'-O-Methyl nucleotide
  modified_base 18: mod_base = OTHER; note = 2'-fluoro nucleotide
  modified_base 19: mod_base = OTHER; note = 2'-O-Methyl nucleotide
  modified_base 20: mod_base = OTHER; note = deoxy-thymine phosphorothioate
  misc_feature 1..19: note = RNA
  misc_feature 20..21: note = DNA
taaatgccaccggcaggattt

SEQ ID NO: 1914 - DNA, 21 bp, synthetic construct
  misc_feature 1..21: note = Description of Artificial Sequence: Synthetic oligonucleotide
  source 1..21: mol_type = other DNA
  modified_base 1: mod_base = OTHER; note = 2'-O-Methyl nucleotide
  modified_base 2: mod_base = OTHER; note = 2'-O-Methyl nucleotide
  modified_base 3: mod_base = OTHER; note = 2'-fluoro nucleotide
  modified_base 4: mod_base = OTHER; note = 2'-O-Methyl nucleotide
  modified_base 5: mod_base = OTHER; note = 2'-fluoro nucleotide
  modified_base 6: mod_base = OTHER; note = 2'-O-Methyl nucleotide
  modified_base 7: mod_base = OTHER; note = 2'-fluoro nucleotide
  modified_base 8: mod_base = OTHER; note = 2'-O-Methyl nucleotide
  modified_base 9: mod_base = OTHER; note = 2'-fluoro nucleotide
  modified_base 10: mod_base = OTHER; note = 2'-O-Methyl nucleotide
  modified_base 11: mod_base = OTHER; note = 2'-fluoro nucleotide
  modified_base 12: mod_base = OTHER; note = 2'-O-Methyl nucleotide
  modified_base 13: mod_base = OTHER; note = 2'-fluoro nucleotide
  modified_base 14: mod_base = OTHER; note = 2'-O-Methyl nucleotide
  modified_base 15: mod_base = OTHER; note = 2'-fluoro nucleotide
  modified_base 16: mod_base = OTHER; note = 2'-O-Methyl nucleotide
  modified_base 17: mod_base = OTHER; note = 2'-fluoro nucleotide
  modified_base 18: mod_base = OTHER; note = 2'-O-Methyl nucleotide
  modified_base 19: mod_base = OTHER; note = 2'-fluoro nucleotide
  modified_base 20: mod_base = OTHER; note = deoxy-thymine phosphorothioate
  misc_feature 1..19: note = RNA
  misc_feature 20..21: note = DNA
ctgccggtggcatttagggtt

SEQ ID NO: 1915 - DNA, 21 bp, synthetic construct
  misc_feature 1..21: note = Description of Artificial Sequence: Synthetic oligonucleotide
  source 1..21: mol_type = other DNA
  modified_base 1: mod_base = OTHER; note = 2'-fluoro nucleotide
  modified_base 2: mod_base = OTHER; note = 2'-fluoro nucleotide
  modified_base 3: mod_base = OTHER; note = 2'-O-Methyl nucleotide
  modified_base 4: mod_base = OTHER; note = 2'-fluoro nucleotide
  modified_base 5: mod_base = OTHER; note = 2'-O-Methyl nucleotide
  modified_base 6: mod_base = OTHER; note = 2'-fluoro nucleotide
  modified_base 7: mod_base = OTHER; note = 2'-O-Methyl nucleotide
  modified_base 8: mod_base = OTHER; note = 2'-fluoro nucleotide
  modified_base 9: mod_base = OTHER; note = 2'-O-Methyl nucleotide
  modified_base 10: mod_base = OTHER; note = 2'-fluoro nucleotide
  modified_base 11: mod_base = OTHER; note = 2'-O-Methyl nucleotide
  modified_base 12: mod_base = OTHER; note = 2'-fluoro nucleotide
  modified_base 13: mod_base = OTHER; note = 2'-O-Methyl nucleotide
  modified_base 14: mod_base = OTHER; note = 2'-fluoro nucleotide
  modified_base 15: mod_base = OTHER; note = 2'-O-Methyl nucleotide
  modified_base 16: mod_base = OTHER; note = 2'-fluoro nucleotide
  modified_base 17: mod_base = OTHER; note = 2'-O-Methyl nucleotide
  modified_base 18: mod_base = OTHER; note = 2'-fluoro nucleotide
  modified_base 19: mod_base = OTHER; note = 2'-O-Methyl nucleotide
  modified_base 20: mod_base = OTHER; note = deoxy-thymine phosphorothioate
  misc_feature 1..19: note = RNA
  misc_feature 20..21: note = DNA
ccctaaatgccaccggcagtt

SEQ ID NO: 1916 - DNA, 21 bp, synthetic construct
  misc_feature 1..21: note = Description of Artificial Sequence: Synthetic oligonucleotide
  source 1..21: mol_type = other DNA
  modified_base 1: mod_base = OTHER; note = 2'-O-Methyl nucleotide
  modified_base 2: mod_base = OTHER; note = 2'-O-Methyl nucleotide
  modified_base 3: mod_base = OTHER; note = 2'-fluoro nucleotide
  modified_base 4: mod_base = OTHER; note = 2'-O-Methyl nucleotide
  modified_base 5: mod_base = OTHER; note = 2'-fluoro nucleotide
  modified_base 6: mod_base = OTHER; note = 2'-O-Methyl nucleotide
  modified_base 7: mod_base = OTHER; note = 2'-fluoro nucleotide
  modified_base 8: mod_base = OTHER; note = 2'-O-Methyl nucleotide
  modified_base 9: mod_base = OTHER; note = 2'-fluoro nucleotide
  modified_base 10: mod_base = OTHER; note = 2'-O-Methyl nucleotide
  modified_base 11: mod_base = OTHER; note = 2'-fluoro nucleotide
  modified_base 12: mod_base = OTHER; note = 2'-O-Methyl nucleotide
  modified_base 13: mod_base = OTHER; note = 2'-fluoro nucleotide
  modified_base 14: mod_base = OTHER; note = 2'-O-Methyl nucleotide
  modified_base 15: mod_base = OTHER; note = 2'-fluoro nucleotide
  modified_base 16: mod_base = OTHER; note = 2'-O-Methyl nucleotide
  modified_base 17: mod_base = OTHER; note = 2'-fluoro nucleotide
  modified_base 18: mod_base = OTHER; note = 2'-O-Methyl nucleotide
  modified_base 19: mod_base = OTHER; note = 2'-fluoro nucleotide
  modified_base 20: mod_base = OTHER; note = deoxy-thymine phosphorothioate
  misc_feature 1..19: note = RNA
  misc_feature 20..21: note = DNA
tgccggtggcatttaggggtt

SEQ ID NO: 1917 - DNA, 21 bp, synthetic construct
  misc_feature 1..21: note = Description of Artificial Sequence: Synthetic oligonucleotide
  source 1..21: mol_type = other DNA
  modified_base 1: mod_base = OTHER; note = 2'-fluoro nucleotide
  modified_base 2: mod_base = OTHER; note = 2'-fluoro nucleotide
  modified_base 3: mod_base = OTHER; note = 2'-O-Methyl nucleotide
  modified_base 4: mod_base = OTHER; note = 2'-fluoro nucleotide
  modified_base 5: mod_base = OTHER; note = 2'-O-Methyl nucleotide
  modified_base 6: mod_base = OTHER; note = 2'-fluoro nucleotide
  modified_base 7: mod_base = OTHER; note = 2'-O-Methyl nucleotide
  modified_base 8: mod_base = OTHER; note = 2'-fluoro nucleotide
  modified_base 9: mod_base = OTHER; note = 2'-O-Methyl nucleotide
  modified_base 10: mod_base = OTHER; note = 2'-fluoro nucleotide
  modified_base 11: mod_base = OTHER; note = 2'-O-Methyl nucleotide
  modified_base 12: mod_base = OTHER; note = 2'-fluoro nucleotide
  modified_base 13: mod_base = OTHER; note = 2'-O-Methyl nucleotide
  modified_base 14: mod_base = OTHER; note = 2'-fluoro nucleotide
  modified_base 15: mod_base = OTHER; note = 2'-O-Methyl nucleotide
  modified_base 16: mod_base = OTHER; note = 2'-fluoro nucleotide
  modified_base 17: mod_base = OTHER; note = 2'-O-Methyl nucleotide
  modified_base 18: mod_base = OTHER; note = 2'-fluoro nucleotide
  modified_base 19: mod_base = OTHER; note = 2'-O-Methyl nucleotide
  modified_base 20: mod_base = OTHER; note = deoxy-thymine phosphorothioate
  misc_feature 1..19: note = RNA
  misc_feature 20..21: note = DNA
cccctaaatgccaccggcatt

SEQ ID NO: 1918 - DNA, 21 bp, synthetic construct
  misc_feature 1..21: note = Description of Artificial Sequence: Synthetic oligonucleotide
  source 1..21: mol_type = other DNA
  modified_base 1: mod_base = OTHER; note = 2'-O-Methyl nucleotide
  modified_base 2: mod_base = OTHER; note = 2'-O-Methyl nucleotide
  modified_base 3: mod_base = OTHER; note = 2'-fluoro nucleotide
  modified_base 4: mod_base = OTHER; note = 2'-O-Methyl nucleotide
  modified_base 5: mod_base = OTHER; note = 2'-fluoro nucleotide
  modified_base 6: mod_base = OTHER; note = 2'-O-Methyl nucleotide
  modified_base 7: mod_base = OTHER; note = 2'-fluoro nucleotide
  modified_base 8: mod_base = OTHER; note = 2'-O-Methyl nucleotide
  modified_base 9: mod_base = OTHER; note = 2'-fluoro nucleotide
  modified_base 10: mod_base = OTHER; note = 2'-O-Methyl nucleotide
  modified_base 11: mod_base = OTHER; note = 2'-fluoro nucleotide
  modified_base 12: mod_base = OTHER; note = 2'-O-Methyl nucleotide
  modified_base 13: mod_base = OTHER; note = 2'-fluoro nucleotide
  modified_base 14: mod_base = OTHER; note = 2'-O-Methyl nucleotide
  modified_base 15: mod_base = OTHER; note = 2'-fluoro nucleotide
  modified_base 16: mod_base = OTHER; note = 2'-O-Methyl nucleotide
  modified_base 17: mod_base = OTHER; note = 2'-fluoro nucleotide
  modified_base 18: mod_base = OTHER; note = 2'-O-Methyl nucleotide
  modified_base 19: mod_base = OTHER; note = 2'-fluoro nucleotide
  modified_base 20: mod_base = OTHER; note = deoxy-thymine phosphorothioate
  misc_feature 1..19: note = RNA
  misc_feature 20..21: note = DNA
gccggtggcatttaggggttt

SEQ ID NO: 1919 - DNA, 21 bp, synthetic construct
  misc_feature 1..21: note = Description of Artificial Sequence: Synthetic oligonucleotide
  source 1..21: mol_type = other DNA
  modified_base 1: mod_base = OTHER; note = 2'-fluoro nucleotide
  modified_base 2: mod_base = OTHER; note = 2'-fluoro nucleotide
  modified_base 3: mod_base = OTHER; note = 2'-O-Methyl nucleotide
  modified_base 4: mod_base = OTHER; note = 2'-fluoro nucleotide
  modified_base 5: mod_base = OTHER; note = 2'-O-Methyl nucleotide
  modified_base 6: mod_base = OTHER; note = 2'-fluoro nucleotide
  modified_base 7: mod_base = OTHER; note = 2'-O-Methyl nucleotide
  modified_base 8: mod_base = OTHER; note = 2'-fluoro nucleotide
  modified_base 9: mod_base = OTHER; note = 2'-O-Methyl nucleotide
  modified_base 10: mod_base = OTHER; note = 2'-fluoro nucleotide
  modified_base 11: mod_base = OTHER; note = 2'-O-Methyl nucleotide
  modified_base 12: mod_base = OTHER; note = 2'-fluoro nucleotide
  modified_base 13: mod_base = OTHER; note = 2'-O-Methyl nucleotide
  modified_base 14: mod_base = OTHER; note = 2'-fluoro nucleotide
  modified_base 15: mod_base = OTHER; note = 2'-O-Methyl nucleotide
  modified_base 16: mod_base = OTHER; note = 2'-fluoro nucleotide
  modified_base 17: mod_base = OTHER; note = 2'-O-Methyl nucleotide
  modified_base 18: mod_base = OTHER; note = 2'-fluoro nucleotide
  modified_base 19: mod_base = OTHER; note = 2'-O-Methyl nucleotide
  modified_base 20: mod_base = OTHER; note = deoxy-thymine phosphorothioate
  misc_feature 1..19: note = RNA
  misc_feature 20..21: note = DNA
acccctaaatgccaccggctt

SEQ ID NO: 1920 - DNA, 21 bp, synthetic construct
  misc_feature 1..21: note = Description of Artificial Sequence: Synthetic oligonucleotide
  source 1..21: mol_type = other DNA
  modified_base 1: mod_base = OTHER; note = 2'-O-Methyl nucleotide
  modified_base 2: mod_base = OTHER; note = 2'-O-Methyl nucleotide
  modified_base 3: mod_base = OTHER; note = 2'-fluoro nucleotide
  modified_base 4: mod_base = OTHER; note = 2'-O-Methyl nucleotide
  modified_base 5: mod_base = OTHER; note = 2'-fluoro nucleotide
  modified_base 6: mod_base = OTHER; note = 2'-O-Methyl nucleotide
  modified_base 7: mod_base = OTHER; note = 2'-fluoro nucleotide
  modified_base 8: mod_base = OTHER; note = 2'-O-Methyl nucleotide
  modified_base 9: mod_base = OTHER; note = 2'-fluoro nucleotide
  modified_base 10: mod_base = OTHER; note = 2'-O-Methyl nucleotide
  modified_base 11: mod_base = OTHER; note = 2'-fluoro nucleotide
  modified_base 12: mod_base = OTHER; note = 2'-O-Methyl nucleotide
  modified_base 13: mod_base = OTHER; note = 2'-fluoro nucleotide
  modified_base 14: mod_base = OTHER; note = 2'-O-Methyl nucleotide
  modified_base 15: mod_base = OTHER; note = 2'-fluoro nucleotide
  modified_base 16: mod_base = OTHER; note = 2'-O-Methyl nucleotide
  modified_base 17: mod_base = OTHER; note = 2'-fluoro nucleotide
  modified_base 18: mod_base = OTHER; note = 2'-O-Methyl nucleotide
  modified_base 19: mod_base = OTHER; note = 2'-fluoro nucleotide
  modified_base 20: mod_base = OTHER; note = deoxy-thymine phosphorothioate
  misc_feature 1..19: note = RNA
  misc_feature 20..21: note = DNA
ccggtggcatttaggggtgtt

SEQ ID NO: 1921 - DNA, 21 bp, synthetic construct
  misc_feature 1..21: note = Description of Artificial Sequence: Synthetic oligonucleotide
  source 1..21: mol_type = other DNA
  modified_base 1: mod_base = OTHER; note = 2'-fluoro nucleotide
  modified_base 2: mod_base = OTHER; note = 2'-fluoro nucleotide
  modified_base 3: mod_base = OTHER; note = 2'-O-Methyl nucleotide
  modified_base 4: mod_base = OTHER; note = 2'-fluoro nucleotide
  modified_base 5: mod_base = OTHER; note = 2'-O-Methyl nucleotide
  modified_base 6: mod_base = OTHER; note = 2'-fluoro nucleotide
  modified_base 7: mod_base = OTHER; note = 2'-O-Methyl nucleotide
  modified_base 8: mod_base = OTHER; note = 2'-fluoro nucleotide
  modified_base 9: mod_base = OTHER; note = 2'-O-Methyl nucleotide
  modified_base 10: mod_base = OTHER; note = 2'-fluoro nucleotide
  modified_base 11: mod_base = OTHER; note = 2'-O-Methyl nucleotide
  modified_base 12: mod_base = OTHER; note = 2'-fluoro nucleotide
  modified_base 13: mod_base = OTHER; note = 2'-O-Methyl nucleotide
  modified_base 14: mod_base = OTHER; note = 2'-fluoro nucleotide
  modified_base 15: mod_base = OTHER; note = 2'-O-Methyl nucleotide
  modified_base 16: mod_base = OTHER; note = 2'-fluoro nucleotide
  modified_base 17: mod_base = OTHER; note = 2'-O-Methyl nucleotide
  modified_base 18: mod_base = OTHER; note = 2'-fluoro nucleotide
  modified_base 19: mod_base = OTHER; note = 2'-O-Methyl nucleotide
  modified_base 20: mod_base = OTHER; note = deoxy-thymine phosphorothioate
  misc_feature 1..19: note = RNA
  misc_feature 20..21: note = DNA
cacccctaaatgccaccggtt

SEQ ID NO: 1922 - DNA, 21 bp, synthetic construct
  misc_feature 1..21: note = Description of Artificial Sequence: Synthetic oligonucleotide
  source 1..21: mol_type = other DNA
  modified_base 1: mod_base = OTHER; note = 2'-O-Methyl nucleotide
  modified_base 2: mod_base = OTHER; note = 2'-O-Methyl nucleotide
  modified_base 3: mod_base = OTHER; note = 2'-fluoro nucleotide
  modified_base 4: mod_base = OTHER; note = 2'-O-Methyl nucleotide
  modified_base 5: mod_base = OTHER; note = 2'-fluoro nucleotide
  modified_base 6: mod_base = OTHER; note = 2'-O-Methyl nucleotide
  modified_base 7: mod_base = OTHER; note = 2'-fluoro nucleotide
  modified_base 8: mod_base = OTHER; note = 2'-O-Methyl nucleotide
  modified_base 9: mod_base = OTHER; note = 2'-fluoro nucleotide
  modified_base 10: mod_base = OTHER; note = 2'-O-Methyl nucleotide
  modified_base 11: mod_base = OTHER; note = 2'-fluoro nucleotide
  modified_base 12: mod_base = OTHER; note = 2'-O-Methyl nucleotide
  modified_base 13: mod_base = OTHER; note = 2'-fluoro nucleotide
  modified_base 14: mod_base = OTHER; note = 2'-O-Methyl nucleotide
  modified_base 15: mod_base = OTHER; note = 2'-fluoro nucleotide
  modified_base 16: mod_base = OTHER; note = 2'-O-Methyl nucleotide
  modified_base 17: mod_base = OTHER; note = 2'-fluoro nucleotide
  modified_base 18: mod_base = OTHER; note = 2'-O-Methyl nucleotide
  modified_base 19: mod_base = OTHER; note = 2'-fluoro nucleotide
  modified_base 20: mod_base = OTHER; note = deoxy-thymine phosphorothioate
  misc_feature 1..19: note = RNA
  misc_feature 20..21: note = DNA
gtggcatttaggggtgacttt

SEQ ID NO: 1923 - DNA, 21 bp, synthetic construct
  misc_feature 1..21: note = Description of Artificial Sequence: Synthetic oligonucleotide
  source 1..21: mol_type = other DNA
  modified_base 1: mod_base = OTHER; note = 2'-fluoro nucleotide
  modified_base 2: mod_base = OTHER; note = 2'-fluoro nucleotide
  modified_base 3: mod_base = OTHER; note = 2'-O-Methyl nucleotide
  modified_base 4: mod_base = OTHER; note = 2'-fluoro nucleotide
  modified_base 5: mod_base = OTHER; note = 2'-O-Methyl nucleotide
  modified_base 6: mod_base = OTHER; note = 2'-fluoro nucleotide
  modified_base 7: mod_base = OTHER; note = 2'-O-Methyl nucleotide
  modified_base 8: mod_base = OTHER; note = 2'-fluoro nucleotide
  modified_base 9: mod_base = OTHER; note = 2'-O-Methyl nucleotide
  modified_base 10: mod_base = OTHER; note = 2'-fluoro nucleotide
  modified_base 11: mod_base = OTHER; note = 2'-O-Methyl nucleotide
  modified_base 12: mod_base = OTHER; note = 2'-fluoro nucleotide
  modified_base 13: mod_base = OTHER; note = 2'-O-Methyl nucleotide
  modified_base 14: mod_base = OTHER; note = 2'-fluoro nucleotide
  modified_base 15: mod_base = OTHER; note = 2'-O-Methyl nucleotide
  modified_base 16: mod_base = OTHER; note = 2'-fluoro nucleotide
  modified_base 17: mod_base = OTHER; note = 2'-O-Methyl nucleotide
  modified_base 18: mod_base = OTHER; note = 2'-fluoro nucleotide
  modified_base 19: mod_base = OTHER; note = 2'-O-Methyl nucleotide
  modified_base 20: mod_base = OTHER; note = deoxy-thymine phosphorothioate
  misc_feature 1..19: note = RNA
  misc_feature 20..21: note = DNA
agtcacccctaaatgccactt

SEQ ID NO: 1924 - DNA, 21 bp, synthetic construct
  misc_feature 1..21: note = Description of Artificial Sequence: Synthetic oligonucleotide
  source 1..21: mol_type = other DNA
  modified_base 1: mod_base = OTHER; note = 2'-O-Methyl nucleotide
  modified_base 2: mod_base = OTHER; note = 2'-O-Methyl nucleotide
  modified_base 3: mod_base = OTHER; note = 2'-fluoro nucleotide
  modified_base 4: mod_base = OTHER; note = 2'-O-Methyl nucleotide
  modified_base 5: mod_base = OTHER; note = 2'-fluoro nucleotide
  modified_base 6: mod_base = OTHER; note = 2'-O-Methyl nucleotide
  modified_base 7: mod_base = OTHER; note = 2'-fluoro nucleotide
  modified_base 8: mod_base = OTHER; note = 2'-O-Methyl nucleotide
  modified_base 9: mod_base = OTHER; note = 2'-fluoro nucleotide
  modified_base 10: mod_base = OTHER; note = 2'-O-Methyl nucleotide
  modified_base 11: mod_base = OTHER; note = 2'-fluoro nucleotide
  modified_base 12: mod_base = OTHER; note = 2'-O-Methyl nucleotide
  modified_base 13: mod_base = OTHER; note = 2'-fluoro nucleotide
  modified_base 14: mod_base = OTHER; note = 2'-O-Methyl nucleotide
  modified_base 15: mod_base = OTHER; note = 2'-fluoro nucleotide
  modified_base 16: mod_base = OTHER; note = 2'-O-Methyl nucleotide
  modified_base 17: mod_base = OTHER; note = 2'-fluoro nucleotide
  modified_base 18: mod_base = OTHER; note = 2'-O-Methyl nucleotide
  modified_base 19: mod_base = OTHER; note = 2'-fluoro nucleotide
  modified_base 20: mod_base = OTHER; note = deoxy-thymine phosphorothioate
  misc_feature 1..19: note = RNA
  misc_feature 20..21: note = DNA
gcatttaggggtgactccttt

SEQ ID NO: 1925 - DNA, 21 bp, synthetic construct
  misc_feature 1..21: note = Description of Artificial Sequence: Synthetic oligonucleotide
  source 1..21: mol_type = other DNA
  modified_base 1: mod_base = OTHER; note = 2'-fluoro nucleotide
  modified_base 2: mod_base = OTHER; note = 2'-fluoro nucleotide
  modified_base 3: mod_base = OTHER; note = 2'-O-Methyl nucleotide
  modified_base 4: mod_base = OTHER; note = 2'-fluoro nucleotide
  modified_base 5: mod_base = OTHER; note = 2'-O-Methyl nucleotide
  modified_base 6: mod_base = OTHER; note = 2'-fluoro nucleotide
  modified_base 7: mod_base = OTHER; note = 2'-O-Methyl nucleotide
  modified_base 8: mod_base = OTHER; note = 2'-fluoro nucleotide
  modified_base 9: mod_base = OTHER; note = 2'-O-Methyl nucleotide
  modified_base 10: mod_base = OTHER; note = 2'-fluoro nucleotide
  modified_base 11: mod_base = OTHER; note = 2'-O-Methyl nucleotide
  modified_base 12: mod_base = OTHER; note = 2'-fluoro nucleotide
  modified_base 13: mod_base = OTHER; note = 2'-O-Methyl nucleotide
  modified_base 14: mod_base = OTHER; note = 2'-fluoro nucleotide
  modified_base 15: mod_base = OTHER; note = 2'-O-Methyl nucleotide
  modified_base 16: mod_base = OTHER; note = 2'-fluoro nucleotide
  modified_base 17: mod_base = OTHER; note = 2'-O-Methyl nucleotide
  modified_base 18: mod_base = OTHER; note = 2'-fluoro nucleotide
  modified_base 19: mod_base = OTHER; note = 2'-O-Methyl nucleotide
  modified_base 20: mod_base = OTHER; note = deoxy-thymine phosphorothioate
  misc_feature 1..19: note = RNA
  misc_feature 20..21: note = DNA
aggagtcacccctaaatgctt

SEQ ID NO: 1926 - DNA, 21 bp, synthetic construct
  misc_feature 1..21: note = Description of Artificial Sequence: Synthetic oligonucleotide
  source 1..21: mol_type = other DNA
  modified_base 1: mod_base = OTHER; note = 2'-O-Methyl nucleotide
  modified_base 2: mod_base = OTHER; note = 2'-O-Methyl nucleotide
  modified_base 3: mod_base = OTHER; note = 2'-fluoro nucleotide
  modified_base 4: mod_base = OTHER; note = 2'-O-Methyl nucleotide
  modified_base 5: mod_base = OTHER; note = 2'-fluoro nucleotide
  modified_base 6: mod_base = OTHER; note = 2'-O-Methyl nucleotide
  modified_base 7: mod_base = OTHER; note = 2'-fluoro nucleotide
  modified_base 8: mod_base = OTHER; note = 2'-O-Methyl nucleotide
  modified_base 9: mod_base = OTHER; note = 2'-fluoro nucleotide
  modified_base 10: mod_base = OTHER; note = 2'-O-Methyl nucleotide
  modified_base 11: mod_base = OTHER; note = 2'-fluoro nucleotide
  modified_base 12: mod_base = OTHER; note = 2'-O-Methyl nucleotide
  modified_base 13: mod_base = OTHER; note = 2'-fluoro nucleotide
  modified_base 14: mod_base = OTHER; note = 2'-O-Methyl nucleotide
  modified_base 15: mod_base = OTHER; note = 2'-fluoro nucleotide
  modified_base 16: mod_base = OTHER; note = 2'-O-Methyl nucleotide
  modified_base 17: mod_base = OTHER; note = 2'-fluoro nucleotide
  modified_base 18: mod_base = OTHER; note = 2'-O-Methyl nucleotide
  modified_base 19: mod_base = OTHER; note = 2'-fluoro nucleotide
  modified_base 20: mod_base = OTHER; note = deoxy-thymine phosphorothioate
  misc_feature 1..19: note = RNA
  misc_feature 20..21: note = DNA
catttaggggtgactcctttt

SEQ ID NO: 1927 - DNA, 21 bp, synthetic construct
  misc_feature 1..21: note = Description of Artificial Sequence: Synthetic oligonucleotide
  source 1..21: mol_type = other DNA
  modified_base 1: mod_base = OTHER; note = 2'-fluoro nucleotide
  modified_base 2: mod_base = OTHER; note = 2'-fluoro nucleotide
  modified_base 3: mod_base = OTHER; note = 2'-O-Methyl nucleotide
  modified_base 4: mod_base = OTHER; note = 2'-fluoro nucleotide
  modified_base 5: mod_base = OTHER; note = 2'-O-Methyl nucleotide
  modified_base 6: mod_base = OTHER; note = 2'-fluoro nucleotide
  modified_base 7: mod_base = OTHER; note = 2'-O-Methyl nucleotide
  modified_base 8: mod_base = OTHER; note = 2'-fluoro nucleotide
  modified_base 9: mod_base = OTHER; note = 2'-O-Methyl nucleotide
  modified_base 10: mod_base = OTHER; note = 2'-fluoro nucleotide
  modified_base 11: mod_base = OTHER; note = 2'-O-Methyl nucleotide
  modified_base 12: mod_base = OTHER; note = 2'-fluoro nucleotide
  modified_base 13: mod_base = OTHER; note = 2'-O-Methyl nucleotide
  modified_base 14: mod_base = OTHER; note = 2'-fluoro nucleotide
  modified_base 15: mod_base = OTHER; note = 2'-O-Methyl nucleotide
  modified_base 16: mod_base = OTHER; note = 2'-fluoro nucleotide
  modified_base 17: mod_base = OTHER; note = 2'-O-Methyl nucleotide
  modified_base 18: mod_base = OTHER; note = 2'-fluoro nucleotide
  modified_base 19: mod_base = OTHER; note = 2'-O-Methyl nucleotide
  modified_base 20: mod_base = OTHER; note = deoxy-thymine phosphorothioate
  misc_feature 1..19: note = RNA
  misc_feature 20..21: note = DNA
aaggagtcacccctaaatgtt

SEQ ID NO: 1928 - DNA, 21 bp, synthetic construct
  misc_feature 1..21: note = Description of Artificial Sequence: Synthetic oligonucleotide
  source 1..21: mol_type = other DNA
  modified_base 1: mod_base = OTHER; note = 2'-O-Methyl nucleotide
  modified_base 2: mod_base = OTHER; note = 2'-O-Methyl nucleotide
  modified_base 3: mod_base = OTHER; note = 2'-fluoro nucleotide
  modified_base 4: mod_base = OTHER; note = 2'-O-Methyl nucleotide
  modified_base 5: mod_base = OTHER; note = 2'-fluoro nucleotide
  modified_base 6: mod_base = OTHER; note = 2'-O-Methyl nucleotide
  modified_base 7: mod_base = OTHER; note = 2'-fluoro nucleotide
  modified_base 8: mod_base = OTHER; note = 2'-O-Methyl nucleotide
  modified_base 9: mod_base = OTHER; note = 2'-fluoro nucleotide
  modified_base 10: mod_base = OTHER; note = 2'-O-Methyl nucleotide
  modified_base 11: mod_base = OTHER; note = 2'-fluoro nucleotide
  modified_base 12: mod_base = OTHER; note = 2'-O-Methyl nucleotide
  modified_base 13: mod_base = OTHER; note = 2'-fluoro nucleotide
  modified_base 14: mod_base = OTHER; note = 2'-O-Methyl nucleotide
  modified_base 15: mod_base = OTHER; note = 2'-fluoro nucleotide
  modified_base 16: mod_base = OTHER; note = 2'-O-Methyl nucleotide
  modified_base 17: mod_base = OTHER; note = 2'-fluoro nucleotide
  modified_base 18: mod_base = OTHER; note = 2'-O-Methyl nucleotide
  modified_base 19: mod_base = OTHER; note = 2'-fluoro nucleotide
  modified_base 20: mod_base = OTHER; note = deoxy-thymine phosphorothioate
  misc_feature 1..19: note = RNA
  misc_feature 20..21: note = DNA
atttaggggtgactccttctt

SEQ ID NO: 1929 - DNA, 21 bp, synthetic construct
  misc_feature 1..21: note = Description of Artificial Sequence: Synthetic oligonucleotide
  source 1..21: mol_type = other DNA
  modified_base 1: mod_base = OTHER; note = 2'-fluoro nucleotide
  modified_base 2: mod_base = OTHER; note = 2'-fluoro nucleotide
  modified_base 3: mod_base = OTHER; note = 2'-O-Methyl nucleotide
  modified_base 4: mod_base = OTHER; note = 2'-fluoro nucleotide
  modified_base 5: mod_base = OTHER; note = 2'-O-Methyl nucleotide
  modified_base 6: mod_base = OTHER; note = 2'-fluoro nucleotide
  modified_base 7: mod_base = OTHER; note = 2'-O-Methyl nucleotide
  modified_base 8: mod_base = OTHER; note = 2'-fluoro nucleotide
  modified_base 9: mod_base = OTHER; note = 2'-O-Methyl nucleotide
  modified_base 10: mod_base = OTHER; note = 2'-fluoro nucleotide
  modified_base 11: mod_base = OTHER; note = 2'-O-Methyl nucleotide
  modified_base 12: mod_base = OTHER; note = 2'-fluoro nucleotide
  modified_base 13: mod_base = OTHER; note = 2'-O-Methyl nucleotide
  modified_base 14: mod_base = OTHER; note = 2'-fluoro nucleotide
  modified_base 15: mod_base = OTHER; note = 2'-O-Methyl nucleotide
  modified_base 16: mod_base = OTHER; note = 2'-fluoro nucleotide
  modified_base 17: mod_base = OTHER; note = 2'-O-Methyl nucleotide
  modified_base 18: mod_base = OTHER; note = 2'-fluoro nucleotide
  modified_base 19: mod_base = OTHER; note = 2'-O-Methyl nucleotide
  modified_base 20: mod_base = OTHER; note = deoxy-thymine phosphorothioate
  misc_feature 1..19: note = RNA
  misc_feature 20..21: note = DNA
gaaggagtcacccctaaattt

SEQ ID NO: 1930 - DNA, 21 bp, synthetic construct
  misc_feature 1..21: note = Description of Artificial Sequence: Synthetic oligonucleotide
  source 1..21: mol_type = other DNA
  modified_base 1: mod_base = OTHER; note = 2'-O-Methyl nucleotide
  modified_base 2: mod_base = OTHER; note = 2'-O-Methyl nucleotide
  modified_base 3: mod_base = OTHER; note = 2'-fluoro nucleotide
  modified_base 4: mod_base = OTHER; note = 2'-O-Methyl nucleotide
  modified_base 5: mod_base = OTHER; note = 2'-fluoro nucleotide
  modified_base 6: mod_base = OTHER; note = 2'-O-Methyl nucleotide
  modified_base 7: mod_base = OTHER; note = 2'-fluoro nucleotide
  modified_base 8: mod_base = OTHER; note = 2'-O-Methyl nucleotide
  modified_base 9: mod_base = OTHER; note = 2'-fluoro nucleotide
  modified_base 10: mod_base = OTHER; note = 2'-O-Methyl nucleotide
  modified_base 11: mod_base = OTHER; note = 2'-fluoro nucleotide
  modified_base 12: mod_base = OTHER; note = 2'-O-Methyl nucleotide
  modified_base 13: mod_base = OTHER; note = 2'-fluoro nucleotide
  modified_base 14: mod_base = OTHER; note = 2'-O-Methyl nucleotide
  modified_base 15: mod_base = OTHER; note = 2'-fluoro nucleotide
  modified_base 16: mod_base = OTHER; note = 2'-O-Methyl nucleotide
  modified_base 17: mod_base = OTHER; note = 2'-fluoro nucleotide
  modified_base 18: mod_base = OTHER; note = 2'-O-Methyl nucleotide
  modified_base 19: mod_base = OTHER; note = 2'-fluoro nucleotide
  modified_base 20: mod_base = OTHER; note = deoxy-thymine phosphorothioate
  misc_feature 1..19: note = RNA
  misc_feature 20..21: note = DNA
tttaggggtgactccttcatt

SEQ ID NO: 1931 - DNA, 21 bp, synthetic construct
  misc_feature 1..21: note = Description of Artificial Sequence: Synthetic oligonucleotide
  source 1..21: mol_type = other DNA
  modified_base 1: mod_base = OTHER; note = 2'-fluoro nucleotide
  modified_base 2: mod_base = OTHER; note = 2'-fluoro nucleotide
  modified_base 3: mod_base = OTHER; note = 2'-O-Methyl nucleotide
  modified_base 4: mod_base = OTHER; note = 2'-fluoro nucleotide
  modified_base 5: mod_base = OTHER; note = 2'-O-Methyl nucleotide
  modified_base 6: mod_base = OTHER; note = 2'-fluoro nucleotide
  modified_base 7: mod_base = OTHER; note = 2'-O-Methyl nucleotide
  modified_base 8: mod_base = OTHER; note = 2'-fluoro nucleotide
  modified_base 9: mod_base = OTHER; note = 2'-O-Methyl nucleotide
  modified_base 10: mod_base = OTHER; note = 2'-fluoro nucleotide
  modified_base 11: mod_base = OTHER; note = 2'-O-Methyl nucleotide
  modified_base 12: mod_base = OTHER; note = 2'-fluoro nucleotide
  modified_base 13: mod_base = OTHER; note = 2'-O-Methyl nucleotide
  modified_base 14: mod_base = OTHER; note = 2'-fluoro nucleotide
  modified_base 15: mod_base = OTHER; note = 2'-O-Methyl nucleotide
  modified_base 16: mod_base = OTHER; note = 2'-fluoro nucleotide
  modified_base 17: mod_base = OTHER; note = 2'-O-Methyl nucleotide
  modified_base 18: mod_base = OTHER; note = 2'-fluoro nucleotide
  modified_base 19: mod_base = OTHER; note = 2'-O-Methyl nucleotide
  modified_base 20: mod_base = OTHER; note = deoxy-thymine phosphorothioate
  misc_feature 1..19: note = RNA
  misc_feature 20..21: note = DNA
tgaaggagtcacccctaaatt

SEQ ID NO: 1932 - DNA, 21 bp, synthetic construct
  misc_feature 1..21: note = Description of Artificial Sequence: Synthetic oligonucleotide
  source 1..21: mol_type = other DNA
  modified_base 1: mod_base = OTHER; note = 2'-O-Methyl nucleotide
  modified_base 2: mod_base = OTHER; note = 2'-O-Methyl nucleotide
  modified_base 3: mod_base = OTHER; note = 2'-fluoro nucleotide
  modified_base 4: mod_base = OTHER; note = 2'-O-Methyl nucleotide
  modified_base 5: mod_base = OTHER; note = 2'-fluoro nucleotide
  modified_base 6: mod_base = OTHER; note = 2'-O-Methyl nucleotide
  modified_base 7: mod_base = OTHER; note = 2'-fluoro nucleotide
  modified_base 8: mod_base = OTHER; note = 2'-O-Methyl nucleotide
  modified_base 9: mod_base = OTHER; note = 2'-fluoro nucleotide
  modified_base 10: mod_base = OTHER; note = 2'-O-Methyl nucleotide
  modified_base 11: mod_base = OTHER; note = 2'-fluoro nucleotide
  modified_base 12: mod_base = OTHER; note = 2'-O-Methyl nucleotide
  modified_base 13: mod_base = OTHER; note = 2'-fluoro nucleotide
  modified_base 14: mod_base = OTHER; note = 2'-O-Methyl nucleotide
  modified_base 15: mod_base = OTHER; note = 2'-fluoro nucleotide
  modified_base 16: mod_base = OTHER; note = 2'-O-Methyl nucleotide
  modified_base 17: mod_base = OTHER; note = 2'-fluoro nucleotide
  modified_base 18: mod_base = OTHER; note = 2'-O-Methyl nucleotide
  modified_base 19: mod_base = OTHER; note = 2'-fluoro nucleotide
  modified_base 20: mod_base = OTHER; note = deoxy-thymine phosphorothioate
  misc_feature 1..19: note = RNA
  misc_feature 20..21: note = DNA
ttaggggtgactccttcactt

SEQ ID NO: 1933 - DNA, 21 bp, synthetic construct
  misc_feature 1..21: note = Description of Artificial Sequence: Synthetic oligonucleotide
  source 1..21: mol_type = other DNA
  modified_base 1: mod_base = OTHER; note = 2'-fluoro nucleotide
  modified_base 2: mod_base = OTHER; note = 2'-fluoro nucleotide
  modified_base 3: mod_base = OTHER; note = 2'-O-Methyl nucleotide
  modified_base 4: mod_base = OTHER; note = 2'-fluoro nucleotide
  modified_base 5: mod_base = OTHER; note = 2'-O-Methyl nucleotide
  modified_base 6: mod_base = OTHER; note = 2'-fluoro nucleotide
  modified_base 7: mod_base = OTHER; note = 2'-O-Methyl nucleotide
  modified_base 8: mod_base = OTHER; note = 2'-fluoro nucleotide
  modified_base 9: mod_base = OTHER; note = 2'-O-Methyl nucleotide
  modified_base 10: mod_base = OTHER; note = 2'-fluoro nucleotide
  modified_base 11: mod_base = OTHER; note = 2'-O-Methyl nucleotide
  modified_base 12: mod_base = OTHER; note = 2'-fluoro nucleotide
  modified_base 13: mod_base = OTHER; note = 2'-O-Methyl nucleotide
  modified_base 14: mod_base = OTHER; note = 2'-fluoro nucleotide
  modified_base 15: mod_base = OTHER; note = 2'-O-Methyl nucleotide
  modified_base 16: mod_base = OTHER; note = 2'-fluoro nucleotide
  modified_base 17: mod_base = OTHER; note = 2'-O-Methyl nucleotide
  modified_base 18: mod_base = OTHER; note = 2'-fluoro nucleotide
  modified_base 19: mod_base = OTHER; note = 2'-O-Methyl nucleotide
  modified_base 20: mod_base = OTHER; note = deoxy-thymine phosphorothioate
  misc_feature 1..19: note = RNA
  misc_feature 20..21: note = DNA
gtgaaggagtcacccctaatt

SEQ ID NO: 1934 - DNA, 21 bp, synthetic construct
  misc_feature 1..21: note = Description of Artificial Sequence: Synthetic oligonucleotide
  source 1..21: mol_type = other DNA
  modified_base 1: mod_base = OTHER; note = 2'-O-Methyl nucleotide
  modified_base 2: mod_base = OTHER; note = 2'-O-Methyl nucleotide
  modified_base 3: mod_base = OTHER; note = 2'-fluoro nucleotide
  modified_base 4: mod_base = OTHER; note = 2'-O-Methyl nucleotide
  modified_base 5: mod_base = OTHER; note = 2'-fluoro nucleotide
  modified_base 6: mod_base = OTHER; note = 2'-O-Methyl nucleotide
  modified_base 7: mod_base = OTHER; note = 2'-fluoro nucleotide
  modified_base 8: mod_base = OTHER; note = 2'-O-Methyl nucleotide
  modified_base 9: mod_base = OTHER; note = 2'-fluoro nucleotide
  modified_base 10: mod_base = OTHER; note = 2'-O-Methyl nucleotide
  modified_base 11: mod_base = OTHER; note = 2'-fluoro nucleotide
  modified_base 12: mod_base = OTHER; note = 2'-O-Methyl nucleotide
  modified_base 13: mod_base = OTHER; note = 2'-fluoro nucleotide
  modified_base 14: mod_base = OTHER; note = 2'-O-Methyl nucleotide
  modified_base 15: mod_base = OTHER; note = 2'-fluoro nucleotide
  modified_base 16: mod_base = OTHER; note = 2'-O-Methyl nucleotide
  modified_base 17: mod_base = OTHER; note = 2'-fluoro nucleotide
  modified_base 18: mod_base = OTHER; note = 2'-O-Methyl nucleotide
  modified_base 19: mod_base = OTHER; note = 2'-fluoro nucleotide
  modified_base 20: mod_base = OTHER; note = deoxy-thymine phosphorothioate
  misc_feature 1..19: note = RNA
  misc_feature 20..21: note = DNA
taggggtgactccttcacatt

SEQ ID NO: 1935 - DNA, 21 bp, synthetic construct
  misc_feature 1..21: note = Description of Artificial Sequence: Synthetic oligonucleotide
  source 1..21: mol_type = other DNA
  modified_base 1: mod_base = OTHER; note = 2'-fluoro nucleotide
  modified_base 2: mod_base = OTHER; note = 2'-fluoro nucleotide
  modified_base 3: mod_base = OTHER; note = 2'-O-Methyl nucleotide
  modified_base 4: mod_base = OTHER; note = 2'-fluoro nucleotide
  modified_base 5: mod_base = OTHER; note = 2'-O-Methyl nucleotide
  modified_base 6: mod_base = OTHER; note = 2'-fluoro nucleotide
  modified_base 7: mod_base = OTHER; note = 2'-O-Methyl nucleotide
  modified_base 8: mod_base = OTHER; note = 2'-fluoro nucleotide
  modified_base 9: mod_base = OTHER; note = 2'-O-Methyl nucleotide
  modified_base 10: mod_base = OTHER; note = 2'-fluoro nucleotide
  modified_base 11: mod_base = OTHER; note = 2'-O-Methyl nucleotide
  modified_base 12: mod_base = OTHER; note = 2'-fluoro nucleotide
  modified_base 13: mod_base = OTHER; note = 2'-O-Methyl nucleotide
  modified_base 14: mod_base = OTHER; note = 2'-fluoro nucleotide
  modified_base 15: mod_base = OTHER; note = 2'-O-Methyl nucleotide
  modified_base 16: mod_base = OTHER; note = 2'-fluoro nucleotide
  modified_base 17: mod_base = OTHER; note = 2'-O-Methyl nucleotide
  modified_base 18: mod_base = OTHER; note = 2'-fluoro nucleotide
  modified_base 19: mod_base = OTHER; note = 2'-O-Methyl nucleotide
  modified_base 20: mod_base = OTHER; note = deoxy-thymine phosphorothioate
  misc_feature 1..19: note = RNA
  misc_feature 20..21: note = DNA
tgtgaaggagtcacccctatt

SEQ ID NO: 1936 - DNA, 21 bp, synthetic construct
  misc_feature 1..21: note = Description of Artificial Sequence: Synthetic oligonucleotide
  source 1..21: mol_type = other DNA
  modified_base 1: mod_base = OTHER; note = 2'-O-Methyl nucleotide
  modified_base 2: mod_base = OTHER; note = 2'-O-Methyl nucleotide
  modified_base 3: mod_base = OTHER; note = 2'-fluoro nucleotide
  modified_base 4: mod_base = OTHER; note = 2'-O-Methyl nucleotide
  modified_base 5: mod_base = OTHER; note = 2'-fluoro nucleotide
  modified_base 6: mod_base = OTHER; note = 2'-O-Methyl nucleotide
  modified_base 7: mod_base = OTHER; note = 2'-fluoro nucleotide
  modified_base 8: mod_base = OTHER; note = 2'-O-Methyl nucleotide
  modified_base 9: mod_base = OTHER; note = 2'-fluoro nucleotide
  modified_base 10: mod_base = OTHER; note = 2'-O-Methyl nucleotide
  modified_base 11: mod_base = OTHER; note = 2'-fluoro nucleotide
  modified_base 12: mod_base = OTHER; note = 2'-O-Methyl nucleotide
  modified_base 13: mod_base = OTHER; note = 2'-fluoro nucleotide
  modified_base 14: mod_base = OTHER; note = 2'-O-Methyl nucleotide
  modified_base 15: mod_base = OTHER; note = 2'-fluoro nucleotide
  modified_base 16: mod_base = OTHER; note = 2'-O-Methyl nucleotide
  modified_base 17: mod_base = OTHER; note = 2'-fluoro nucleotide
  modified_base 18: mod_base = OTHER; note = 2'-O-Methyl nucleotide
  modified_base 19: mod_base = OTHER; note = 2'-fluoro nucleotide
  modified_base 20: mod_base = OTHER; note = deoxy-thymine phosphorothioate
  misc_feature 1..19: note = RNA
  misc_feature 20..21: note = DNA
tctggatccacaggaactgtt

SEQ ID NO: 1937 - DNA, 21 bp, synthetic construct
  misc_feature 1..21: note = Description of Artificial Sequence: Synthetic oligonucleotide
  source 1..21: mol_type = other DNA
  modified_base 1: mod_base = OTHER; note = 2'-fluoro nucleotide
  modified_base 2: mod_base = OTHER; note = 2'-fluoro nucleotide
  modified_base 3: mod_base = OTHER; note = 2'-O-Methyl nucleotide
  modified_base 4: mod_base = OTHER; note = 2'-fluoro nucleotide
  modified_base 5: mod_base = OTHER; note = 2'-O-Methyl nucleotide
  modified_base 6: mod_base = OTHER; note = 2'-fluoro nucleotide
  modified_base 7: mod_base = OTHER; note = 2'-O-Methyl nucleotide
  modified_base 8: mod_base = OTHER; note = 2'-fluoro nucleotide
  modified_base 9: mod_base = OTHER; note = 2'-O-Methyl nucleotide
  modified_base 10: mod_base = OTHER; note = 2'-fluoro nucleotide
  modified_base 11: mod_base = OTHER; note = 2'-O-Methyl nucleotide
  modified_base 12: mod_base = OTHER; note = 2'-fluoro nucleotide
  modified_base 13: mod_base = OTHER; note = 2'-O-Methyl nucleotide
  modified_base 14: mod_base = OTHER; note = 2'-fluoro nucleotide
  modified_base 15: mod_base = OTHER; note = 2'-O-Methyl nucleotide
  modified_base 16: mod_base = OTHER; note = 2'-fluoro nucleotide
  modified_base 17: mod_base = OTHER; note = 2'-O-Methyl nucleotide
  modified_base 18: mod_base = OTHER; note = 2'-fluoro nucleotide
  modified_base 19: mod_base = OTHER; note = 2'-O-Methyl nucleotide
  modified_base 20: mod_base = OTHER; note = deoxy-thymine phosphorothioate
  misc_feature 1..19: note = RNA
  misc_feature 20..21: note = DNA
cagttcctgtggatccagatt

SEQ ID NO: 1938 - DNA, 21 bp, synthetic construct
  misc_feature 1..21: note = Description of Artificial Sequence: Synthetic oligonucleotide
  source 1..21: mol_type = other DNA
  modified_base 1: mod_base = OTHER; note = 2'-O-Methyl nucleotide
  modified_base 2: mod_base = OTHER; note = 2'-O-Methyl nucleotide
  modified_base 3: mod_base = OTHER; note = 2'-fluoro nucleotide
  modified_base 4: mod_base = OTHER; note = 2'-O-Methyl nucleotide
  modified_base 5: mod_base = OTHER; note = 2'-fluoro nucleotide
  modified_base 6: mod_base = OTHER; note = 2'-O-Methyl nucleotide
  modified_base 7: mod_base = OTHER; note = 2'-fluoro nucleotide
  modified_base 8: mod_base = OTHER; note = 2'-O-Methyl nucleotide
  modified_base 9: mod_base = OTHER; note = 2'-fluoro nucleotide
  modified_base 10: mod_base = OTHER; note = 2'-O-Methyl nucleotide
  modified_base 11: mod_base = OTHER; note = 2'-fluoro nucleotide
  modified_base 12: mod_base = OTHER; note = 2'-O-Methyl nucleotide
  modified_base 13: mod_base = OTHER; note = 2'-fluoro nucleotide
  modified_base 14: mod_base = OTHER; note = 2'-O-Methyl nucleotide
  modified_base 15: mod_base = OTHER; note = 2'-fluoro nucleotide
  modified_base 16: mod_base = OTHER; note = 2'-O-Methyl nucleotide
  modified_base 17: mod_base = OTHER; note = 2'-fluoro nucleotide
  modified_base 18: mod_base = OTHER; note = 2'-O-Methyl nucleotide
  modified_base 19: mod_base = OTHER; note = 2'-fluoro nucleotide
  modified_base 20: mod_base = OTHER; note = deoxy-thymine phosphorothioate
  misc_feature 1..19: note = RNA
  misc_feature 20..21: note = DNA
gatccacaggaactggatatt

SEQ ID NO: 1939 - DNA, 21 bp, synthetic construct
  misc_feature 1..21: note = Description of Artificial Sequence: Synthetic oligonucleotide
  source 1..21: mol_type = other DNA
  modified_base 1: mod_base = OTHER; note = 2'-fluoro nucleotide
  modified_base 2: mod_base = OTHER; note = 2'-fluoro nucleotide
  modified_base 3: mod_base = OTHER; note = 2'-O-Methyl nucleotide
  modified_base 4: mod_base = OTHER; note = 2'-fluoro nucleotide
  modified_base 5: mod_base = OTHER; note = 2'-O-Methyl nucleotide
  modified_base 6: mod_base = OTHER; note = 2'-fluoro nucleotide
  modified_base 7: mod_base = OTHER; note = 2'-O-Methyl nucleotide
  modified_base 8: mod_base = OTHER; note = 2'-fluoro nucleotide
  modified_base 9: mod_base = OTHER; note = 2'-O-Methyl nucleotide
  modified_base 10: mod_base = OTHER; note = 2'-fluoro nucleotide
  modified_base 11: mod_base = OTHER; note = 2'-O-Methyl nucleotide
  modified_base 12: mod_base = OTHER; note = 2'-fluoro nucleotide
  modified_base 13: mod_base = OTHER; note = 2'-O-Methyl nucleotide
  modified_base 14: mod_base = OTHER; note = 2'-fluoro nucleotide
  modified_base 15: mod_base = OTHER; note = 2'-O-Methyl nucleotide
  modified_base 16: mod_base = OTHER; note = 2'-fluoro nucleotide
  modified_base 17: mod_base = OTHER; note = 2'-O-Methyl nucleotide
  modified_base 18: mod_base = OTHER; note = 2'-fluoro nucleotide
  modified_base 19: mod_base = OTHER; note = 2'-O-Methyl nucleotide
  modified_base 20: mod_base = OTHER; note = deoxy-thymine phosphorothioate
  misc_feature 1..19: note = RNA
  misc_feature 20..21: note = DNA
tatccagttcctgtggatctt

SEQ ID NO: 1940 - DNA, 21 bp, synthetic construct
  misc_feature 1..21: note = Description of Artificial Sequence: Synthetic oligonucleotide
  source 1..21: mol_type = other DNA
  modified_base 1: mod_base = OTHER; note = 2'-O-Methyl nucleotide
  modified_base 2: mod_base = OTHER; note = 2'-O-Methyl nucleotide
  modified_base 3: mod_base = OTHER; note = 2'-fluoro nucleotide
  modified_base 4: mod_base = OTHER; note = 2'-O-Methyl nucleotide
  modified_base 5: mod_base = OTHER; note = 2'-fluoro nucleotide
  modified_base 6: mod_base = OTHER; note = 2'-O-Methyl nucleotide
  modified_base 7: mod_base = OTHER; note = 2'-fluoro nucleotide
  modified_base 8: mod_base = OTHER; note = 2'-O-Methyl nucleotide
  modified_base 9: mod_base = OTHER; note = 2'-fluoro nucleotide
  modified_base 10: mod_base = OTHER; note = 2'-O-Methyl nucleotide
  modified_base 11: mod_base = OTHER; note = 2'-fluoro nucleotide
  modified_base 12: mod_base = OTHER; note = 2'-O-Methyl nucleotide
  modified_base 13: mod_base = OTHER; note = 2'-fluoro nucleotide
  modified_base 14: mod_base = OTHER; note = 2'-O-Methyl nucleotide
  modified_base 15: mod_base = OTHER; note = 2'-fluoro nucleotide
  modified_base 16: mod_base = OTHER; note = 2'-O-Methyl nucleotide
  modified_base 17: mod_base = OTHER; note = 2'-fluoro nucleotide
  modified_base 18: mod_base = OTHER; note = 2'-O-Methyl nucleotide
  modified_base 19: mod_base = OTHER; note = 2'-fluoro nucleotide
  modified_base 20: mod_base = OTHER; note = deoxy-thymine phosphorothioate
  misc_feature 1..19: note = RNA
  misc_feature 20..21: note = DNA
atccacaggaactggatattt

SEQ ID NO: 1941 - DNA, 21 bp, synthetic construct
  misc_feature 1..21: note = Description of Artificial Sequence: Synthetic oligonucleotide
  source 1..21: mol_type = other DNA
  modified_base 1: mod_base = OTHER; note = 2'-fluoro nucleotide
  modified_base 2: mod_base = OTHER; note = 2'-fluoro nucleotide
  modified_base 3: mod_base = OTHER; note = 2'-O-Methyl nucleotide
  modified_base 4: mod_base = OTHER; note = 2'-fluoro nucleotide
  modified_base 5: mod_base = OTHER; note = 2'-O-Methyl nucleotide
  modified_base 6: mod_base = OTHER; note = 2'-fluoro nucleotide
  modified_base 7: mod_base = OTHER; note = 2'-O-Methyl nucleotide
  modified_base 8: mod_base = OTHER; note = 2'-fluoro nucleotide
  modified_base 9: mod_base = OTHER; note = 2'-O-Methyl nucleotide
  modified_base 10: mod_base = OTHER; note = 2'-fluoro nucleotide
  modified_base 11: mod_base = OTHER; note = 2'-O-Methyl nucleotide
  modified_base 12: mod_base = OTHER; note = 2'-fluoro nucleotide
  modified_base 13: mod_base = OTHER; note = 2'-O-Methyl nucleotide
  modified_base 14: mod_base = OTHER; note = 2'-fluoro nucleotide
  modified_base 15: mod_base = OTHER; note = 2'-O-Methyl nucleotide
  modified_base 16: mod_base = OTHER; note = 2'-fluoro nucleotide
  modified_base 17: mod_base = OTHER; note = 2'-O-Methyl nucleotide
  modified_base 18: mod_base = OTHER; note = 2'-fluoro nucleotide
  modified_base 19: mod_base = OTHER; note = 2'-O-Methyl nucleotide
  modified_base 20: mod_base = OTHER; note = deoxy-thymine phosphorothioate
  misc_feature 1..19: note = RNA
  misc_feature 20..21: note = DNA
atatccagttcctgtggattt

SEQ ID NO: 1942 - DNA, 21 bp, synthetic construct
  misc_feature 1..21: note = Description of Artificial Sequence: Synthetic oligonucleotide
  source 1..21: mol_type = other DNA
  modified_base 1: mod_base = OTHER; note = 2'-O-Methyl nucleotide
  modified_base 2: mod_base = OTHER; note = 2'-O-Methyl nucleotide
  modified_base 3: mod_base = OTHER; note = 2'-fluoro nucleotide
  modified_base 4: mod_base = OTHER; note = 2'-O-Methyl nucleotide
  modified_base 5: mod_base = OTHER; note = 2'-fluoro nucleotide
  modified_base 6: mod_base = OTHER; note = 2'-O-Methyl nucleotide
  modified_base 7: mod_base = OTHER; note = 2'-fluoro nucleotide
  modified_base 8: mod_base = OTHER; note = 2'-O-Methyl nucleotide
  modified_base 9: mod_base = OTHER; note = 2'-fluoro nucleotide
  modified_base 10: mod_base = OTHER; note = 2'-O-Methyl nucleotide
  modified_base 11: mod_base = OTHER; note = 2'-fluoro nucleotide
  modified_base 12: mod_base = OTHER; note = 2'-O-Methyl nucleotide
  modified_base 13: mod_base = OTHER; note = 2'-fluoro nucleotide
  modified_base 14: mod_base = OTHER; note = 2'-O-Methyl nucleotide
  modified_base 15: mod_base = OTHER; note = 2'-fluoro nucleotide
  modified_base 16: mod_base = OTHER; note = 2'-O-Methyl nucleotide
  modified_base 17: mod_base = OTHER; note = 2'-fluoro nucleotide
  modified_base 18: mod_base = OTHER; note = 2'-O-Methyl nucleotide
  modified_base 19: mod_base = OTHER; note = 2'-fluoro nucleotide
  modified_base 20: mod_base = OTHER; note = deoxy-thymine phosphorothioate
  misc_feature 1..19: note = RNA
  misc_feature 20..21: note = DNA
ccacaggaactggatattctt

SEQ ID NO: 1943 - DNA, 21 bp, synthetic construct
  misc_feature 1..21: note = Description of Artificial Sequence: Synthetic oligonucleotide
  source 1..21: mol_type = other DNA
  modified_base 1: mod_base = OTHER; note = 2'-fluoro nucleotide
  modified_base 2: mod_base = OTHER; note = 2'-fluoro nucleotide
  modified_base 3: mod_base = OTHER; note = 2'-O-Methyl nucleotide
  modified_base 4: mod_base = OTHER; note = 2'-fluoro nucleotide
  modified_base 5: mod_base = OTHER; note = 2'-O-Methyl nucleotide
  modified_base 6: mod_base = OTHER; note = 2'-fluoro nucleotide
  modified_base 7: mod_base = OTHER; note = 2'-O-Methyl nucleotide
  modified_base 8: mod_base = OTHER; note = 2'-fluoro nucleotide
  modified_base 9: mod_base = OTHER; note = 2'-O-Methyl nucleotide
  modified_base 10: mod_base = OTHER; note = 2'-fluoro nucleotide
  modified_base 11: mod_base = OTHER; note = 2'-O-Methyl nucleotide
  modified_base 12: mod_base = OTHER; note = 2'-fluoro nucleotide
  modified_base 13: mod_base = OTHER; note = 2'-O-Methyl nucleotide
  modified_base 14: mod_base = OTHER; note = 2'-fluoro nucleotide
  modified_base 15: mod_base = OTHER; note = 2'-O-Methyl nucleotide
  modified_base 16: mod_base = OTHER; note = 2'-fluoro nucleotide
  modified_base 17: mod_base = OTHER; note = 2'-O-Methyl nucleotide
  modified_base 18: mod_base = OTHER; note = 2'-fluoro nucleotide
  modified_base 19: mod_base = OTHER; note = 2'-O-Methyl nucleotide
  modified_base 20: mod_base = OTHER; note = deoxy-thymine phosphorothioate
  misc_feature 1..19: note = RNA
  misc_feature 20..21: note = DNA
gaatatccagttcctgtggtt

SEQ ID NO: 1944 - DNA, 21 bp, synthetic construct
  misc_feature 1..21: note = Description of Artificial Sequence: Synthetic oligonucleotide
  source 1..21: mol_type = other DNA
  modified_base 1: mod_base = OTHER; note = 2'-O-Methyl nucleotide
  modified_base 2: mod_base = OTHER; note = 2'-O-Methyl nucleotide
  modified_base 3: mod_base = OTHER; note = 2'-fluoro nucleotide
  modified_base 4: mod_base = OTHER; note = 2'-O-Methyl nucleotide
  modified_base 5: mod_base = OTHER; note = 2'-fluoro nucleotide
  modified_base 6: mod_base = OTHER; note = 2'-O-Methyl nucleotide
  modified_base 7: mod_base = OTHER; note = 2'-fluoro nucleotide
  modified_base 8: mod_base = OTHER; note = 2'-O-Methyl nucleotide
  modified_base 9: mod_base = OTHER; note = 2'-fluoro nucleotide
  modified_base 10: mod_base = OTHER; note = 2'-O-Methyl nucleotide
  modified_base 11: mod_base = OTHER; note = 2'-fluoro nucleotide
  modified_base 12: mod_base = OTHER; note = 2'-O-Methyl nucleotide
  modified_base 13: mod_base = OTHER; note = 2'-fluoro nucleotide
  modified_base 14: mod_base = OTHER; note = 2'-O-Methyl nucleotide
  modified_base 15: mod_base = OTHER; note = 2'-fluoro nucleotide
  modified_base 16: mod_base = OTHER; note = 2'-O-Methyl nucleotide
  modified_base 17: mod_base = OTHER; note = 2'-fluoro nucleotide
  modified_base 18: mod_base = OTHER; note = 2'-O-Methyl nucleotide
  modified_base 19: mod_base = OTHER; note = 2'-fluoro nucleotide
  modified_base 20: mod_base = OTHER; note = deoxy-thymine phosphorothioate
  misc_feature 1..19: note = RNA
  misc_feature 20..21: note = DNA
cacaggaactggatattcttt

SEQ ID NO: 1945 - DNA, 21 bp, synthetic construct
  misc_feature 1..21: note = Description of Artificial Sequence: Synthetic oligonucleotide
  source 1..21: mol_type = other DNA
  modified_base 1: mod_base = OTHER; note = 2'-fluoro nucleotide
  modified_base 2: mod_base = OTHER; note = 2'-fluoro nucleotide
  modified_base 3: mod_base = OTHER; note = 2'-O-Methyl nucleotide
  modified_base 4: mod_base = OTHER; note = 2'-fluoro nucleotide
  modified_base 5: mod_base = OTHER; note = 2'-O-Methyl nucleotide
  modified_base 6: mod_base = OTHER; note = 2'-fluoro nucleotide
  modified_base 7: mod_base = OTHER; note = 2'-O-Methyl nucleotide
  modified_base 8: mod_base = OTHER; note = 2'-fluoro nucleotide
  modified_base 9: mod_base = OTHER; note = 2'-O-Methyl nucleotide
  modified_base 10: mod_base = OTHER; note = 2'-fluoro nucleotide
  modified_base 11: mod_base = OTHER; note = 2'-O-Methyl nucleotide
  modified_base 12: mod_base = OTHER; note = 2'-fluoro nucleotide
  modified_base 13: mod_base = OTHER; note = 2'-O-Methyl nucleotide
  modified_base 14: mod_base = OTHER; note = 2'-fluoro nucleotide
  modified_base 15: mod_base = OTHER; note = 2'-O-Methyl nucleotide
  modified_base 16: mod_base = OTHER; note = 2'-fluoro nucleotide
  modified_base 17: mod_base = OTHER; note = 2'-O-Methyl nucleotide
  modified_base 18: mod_base = OTHER; note = 2'-fluoro nucleotide
  modified_base 19: mod_base = OTHER; note = 2'-O-Methyl nucleotide
  modified_base 20: mod_base = OTHER; note = deoxy-thymine phosphorothioate
  misc_feature 1..19: note = RNA
  misc_feature 20..21: note = DNA
agaatatccagttcctgtgtt

SEQ ID NO: 1946 - DNA, 21 bp, synthetic construct
  misc_feature 1..21: note = Description of Artificial Sequence: Synthetic oligonucleotide
  source 1..21: mol_type = other DNA
  modified_base 1: mod_base = OTHER; note = 2'-O-Methyl nucleotide
  modified_base 2: mod_base = OTHER; note = 2'-O-Methyl nucleotide
  modified_base 3: mod_base = OTHER; note = 2'-fluoro nucleotide
  modified_base 4: mod_base = OTHER; note = 2'-O-Methyl nucleotide
  modified_base 5: mod_base = OTHER; note = 2'-fluoro nucleotide
  modified_base 6: mod_base = OTHER; note = 2'-O-Methyl nucleotide
  modified_base 7: mod_base = OTHER; note = 2'-fluoro nucleotide
  modified_base 8: mod_base = OTHER; note = 2'-O-Methyl nucleotide
  modified_base 9: mod_base = OTHER; note = 2'-fluoro nucleotide
  modified_base 10: mod_base = OTHER; note = 2'-O-Methyl nucleotide
  modified_base 11: mod_base = OTHER; note = 2'-fluoro nucleotide
  modified_base 12: mod_base = OTHER; note = 2'-O-Methyl nucleotide
  modified_base 13: mod_base = OTHER; note = 2'-fluoro nucleotide
  modified_base 14: mod_base = OTHER; note = 2'-O-Methyl nucleotide
  modified_base 15: mod_base = OTHER; note = 2'-fluoro nucleotide
  modified_base 16: mod_base = OTHER; note = 2'-O-Methyl nucleotide
  modified_base 17: mod_base = OTHER; note = 2'-fluoro nucleotide
  modified_base 18: mod_base = OTHER; note = 2'-O-Methyl nucleotide
  modified_base 19: mod_base = OTHER; note = 2'-fluoro nucleotide
  modified_base 20: mod_base = OTHER; note = deoxy-thymine phosphorothioate
  misc_feature 1..19: note = RNA
  misc_feature 20..21: note = DNA
actggatattctgaaaacctt

SEQ ID NO: 1947 - DNA, 21 bp, synthetic construct
  misc_feature 1..21: note = Description of Artificial Sequence: Synthetic oligonucleotide
  source 1..21: mol_type = other DNA
  modified_base 1: mod_base = OTHER; note = 2'-fluoro nucleotide
  modified_base 2: mod_base = OTHER; note = 2'-fluoro nucleotide
  modified_base 3: mod_base = OTHER; note = 2'-O-Methyl nucleotide
  modified_base 4: mod_base = OTHER; note = 2'-fluoro nucleotide
  modified_base 5: mod_base = OTHER; note = 2'-O-Methyl nucleotide
  modified_base 6: mod_base = OTHER; note = 2'-fluoro nucleotide
  modified_base 7: mod_base = OTHER; note = 2'-O-Methyl nucleotide
  modified_base 8: mod_base = OTHER; note = 2'-fluoro nucleotide
  modified_base 9: mod_base = OTHER; note = 2'-O-Methyl nucleotide
  modified_base 10: mod_base = OTHER; note = 2'-fluoro nucleotide
  modified_base 11: mod_base = OTHER; note = 2'-O-Methyl nucleotide
  modified_base 12: mod_base = OTHER; note = 2'-fluoro nucleotide
  modified_base 13: mod_base = OTHER; note = 2'-O-Methyl nucleotide
  modified_base 14: mod_base = OTHER; note = 2'-fluoro nucleotide
  modified_base 15: mod_base = OTHER; note = 2'-O-Methyl nucleotide
  modified_base 16: mod_base = OTHER; note = 2'-fluoro nucleotide
  modified_base 17: mod_base = OTHER; note = 2'-O-Methyl nucleotide
  modified_base 18: mod_base = OTHER; note = 2'-fluoro nucleotide
  modified_base 19: mod_base = OTHER; note = 2'-O-Methyl nucleotide
  modified_base 20: mod_base = OTHER; note = deoxy-thymine phosphorothioate
  misc_feature 1..19: note = RNA
  misc_feature 20..21: note = DNA
ggttttcagaatatccagttt

SEQ ID NO: 1948 - DNA, 21 bp, synthetic construct
  misc_feature 1..21: note = Description of Artificial Sequence: Synthetic oligonucleotide
  source 1..21: mol_type = other DNA
  modified_base 1: mod_base = OTHER; note = 2'-O-Methyl nucleotide
  modified_base 2: mod_base = OTHER; note = 2'-O-Methyl nucleotide
  modified_base 3: mod_base = OTHER; note = 2'-fluoro nucleotide
  modified_base 4: mod_base = OTHER; note = 2'-O-Methyl nucleotide
  modified_base 5: mod_base = OTHER; note = 2'-fluoro nucleotide
  modified_base 6: mod_base = OTHER; note = 2'-O-Methyl nucleotide
  modified_base 7: mod_base = OTHER; note = 2'-fluoro nucleotide
  modified_base 8: mod_base = OTHER; note = 2'-O-Methyl nucleotide
  modified_base 9: mod_base = OTHER; note = 2'-fluoro nucleotide
  modified_base 10: mod_base = OTHER; note = 2'-O-Methyl nucleotide
  modified_base 11: mod_base = OTHER; note = 2'-fluoro nucleotide
  modified_base 12: mod_base = OTHER; note = 2'-O-Methyl nucleotide
  modified_base 13: mod_base = OTHER; note = 2'-fluoro nucleotide
  modified_base 14: mod_base = OTHER; note = 2'-O-Methyl nucleotide
  modified_base 15: mod_base = OTHER; note = 2'-fluoro nucleotide
  modified_base 16: mod_base = OTHER; note = 2'-O-Methyl nucleotide
  modified_base 17: mod_base = OTHER; note = 2'-fluoro nucleotide
  modified_base 18: mod_base = OTHER; note = 2'-O-Methyl nucleotide
  modified_base 19: mod_base = OTHER; note = 2'-fluoro nucleotide
  modified_base 20: mod_base = OTHER; note = deoxy-thymine phosphorothioate
  misc_feature 1..19: note = RNA
  misc_feature 20..21: note = DNA
attctgaaaaccgtaaaggtt

SEQ ID NO: 1949 - DNA, 21 bp, synthetic construct
  misc_feature 1..21: note = Description of Artificial Sequence: Synthetic oligonucleotide
  source 1..21: mol_type = other DNA
  modified_base 1: mod_base = OTHER; note = 2'-fluoro nucleotide
  modified_base 2: mod_base = OTHER; note = 2'-fluoro nucleotide
  modified_base 3: mod_base = OTHER; note = 2'-O-Methyl nucleotide
  modified_base 4: mod_base = OTHER; note = 2'-fluoro nucleotide
  modified_base 5: mod_base = OTHER; note = 2'-O-Methyl nucleotide
  modified_base 6: mod_base = OTHER; note = 2'-fluoro nucleotide
  modified_base 7: mod_base = OTHER; note = 2'-O-Methyl nucleotide
  modified_base 8: mod_base = OTHER; note = 2'-fluoro nucleotide
  modified_base 9: mod_base = OTHER; note = 2'-O-Methyl nucleotide
  modified_base 10: mod_base = OTHER; note = 2'-fluoro nucleotide
  modified_base 11: mod_base = OTHER; note = 2'-O-Methyl nucleotide
  modified_base 12: mod_base = OTHER; note = 2'-fluoro nucleotide
  modified_base 13: mod_base = OTHER; note = 2'-O-Methyl nucleotide
  modified_base 14: mod_base = OTHER; note = 2'-fluoro nucleotide
  modified_base 15: mod_base = OTHER; note = 2'-O-Methyl nucleotide
  modified_base 16: mod_base = OTHER; note = 2'-fluoro nucleotide
  modified_base 17: mod_base = OTHER; note = 2'-O-Methyl nucleotide
  modified_base 18: mod_base = OTHER; note = 2'-fluoro nucleotide
  modified_base 19: mod_base = OTHER; note = 2'-O-Methyl nucleotide
  modified_base 20: mod_base = OTHER; note = deoxy-thymine phosphorothioate
  misc_feature 1..19: note = RNA
  misc_feature 20..21: note = DNA
cctttacggttttcagaattt

SEQ ID NO: 1950 - DNA, 21 bp, synthetic construct
  misc_feature 1..21: note = Description of Artificial Sequence: Synthetic oligonucleotide
  source 1..21: mol_type = other DNA
  modified_base 1: mod_base = OTHER; note = 2'-O-Methyl nucleotide
  modified_base 2: mod_base = OTHER; note = 2'-O-Methyl nucleotide
  modified_base 3: mod_base = OTHER; note = 2'-fluoro nucleotide
  modified_base 4: mod_base = OTHER; note = 2'-O-Methyl nucleotide
  modified_base 5: mod_base = OTHER; note = 2'-fluoro nucleotide
  modified_base 6: mod_base = OTHER; note = 2'-O-Methyl nucleotide
  modified_base 7: mod_base = OTHER; note = 2'-fluoro nucleotide
  modified_base 8: mod_base = OTHER; note = 2'-O-Methyl nucleotide
  modified_base 9: mod_base = OTHER; note = 2'-fluoro nucleotide
  modified_base 10: mod_base = OTHER; note = 2'-O-Methyl nucleotide
  modified_base 11: mod_base = OTHER; note = 2'-fluoro nucleotide
  modified_base 12: mod_base = OTHER; note = 2'-O-Methyl nucleotide
  modified_base 13: mod_base = OTHER; note = 2'-fluoro nucleotide
  modified_base 14: mod_base = OTHER; note = 2'-O-Methyl nucleotide
  modified_base 15: mod_base = OTHER; note = 2'-fluoro nucleotide
  modified_base 16: mod_base = OTHER; note = 2'-O-Methyl nucleotide
  modified_base 17: mod_base = OTHER; note = 2'-fluoro nucleotide
  modified_base 18: mod_base = OTHER; note = 2'-O-Methyl nucleotide
  modified_base 19: mod_base = OTHER; note = 2'-fluoro nucleotide
  modified_base 20: mod_base = OTHER; note = deoxy-thymine phosphorothioate
  misc_feature 1..19: note = RNA
  misc_feature 20..21: note = DNA
ttctgaaaaccgtaaaggatt

SEQ ID NO: 1951 - DNA, 21 bp, synthetic construct
  misc_feature 1..21: note = Description of Artificial Sequence: Synthetic oligonucleotide
  source 1..21: mol_type = other DNA
  modified_base 1: mod_base = OTHER; note = 2'-fluoro nucleotide
  modified_base 2: mod_base = OTHER; note = 2'-fluoro nucleotide
  modified_base 3: mod_base = OTHER; note = 2'-O-Methyl nucleotide
  modified_base 4: mod_base = OTHER; note = 2'-fluoro nucleotide
  modified_base 5: mod_base = OTHER; note = 2'-O-Methyl nucleotide
  modified_base 6: mod_base = OTHER; note = 2'-fluoro nucleotide
  modified_base 7: mod_base = OTHER; note = 2'-O-Methyl nucleotide
  modified_base 8: mod_base = OTHER; note = 2'-fluoro nucleotide
  modified_base 9: mod_base = OTHER; note = 2'-O-Methyl nucleotide
  modified_base 10: mod_base = OTHER; note = 2'-fluoro nucleotide
  modified_base 11: mod_base = OTHER; note = 2'-O-Methyl nucleotide
  modified_base 12: mod_base = OTHER; note = 2'-fluoro nucleotide
  modified_base 13: mod_base = OTHER; note = 2'-O-Methyl nucleotide
  modified_base 14: mod_base = OTHER; note = 2'-fluoro nucleotide
  modified_base 15: mod_base = OTHER; note = 2'-O-Methyl nucleotide
  modified_base 16: mod_base = OTHER; note = 2'-fluoro nucleotide
  modified_base 17: mod_base = OTHER; note = 2'-O-Methyl nucleotide
  modified_base 18: mod_base = OTHER; note = 2'-fluoro nucleotide
  modified_base 19: mod_base = OTHER; note = 2'-O-Methyl nucleotide
  modified_base 20: mod_base = OTHER; note = deoxy-thymine phosphorothioate
  misc_feature 1..19: note = RNA
  misc_feature 20..21: note = DNA
tcctttacggttttcagaatt

SEQ ID NO: 1952 - DNA, 21 bp, synthetic construct
  misc_feature 1..21: note = Description of Artificial Sequence: Synthetic oligonucleotide
  source 1..21: mol_type = other DNA
  modified_base 1: mod_base = OTHER; note = 2'-O-Methyl nucleotide
  modified_base 2: mod_base = OTHER; note = 2'-O-Methyl nucleotide
  modified_base 3: mod_base = OTHER; note = 2'-fluoro nucleotide
  modified_base 4: mod_base = OTHER; note = 2'-O-Methyl nucleotide
  modified_base 5: mod_base = OTHER; note = 2'-fluoro nucleotide
  modified_base 6: mod_base = OTHER; note = 2'-O-Methyl nucleotide
  modified_base 7: mod_base = OTHER; note = 2'-fluoro nucleotide
  modified_base 8: mod_base = OTHER; note = 2'-O-Methyl nucleotide
  modified_base 9: mod_base = OTHER; note = 2'-fluoro nucleotide
  modified_base 10: mod_base = OTHER; note = 2'-O-Methyl nucleotide
  modified_base 11: mod_base = OTHER; note = 2'-fluoro nucleotide
  modified_base 12: mod_base = OTHER; note = 2'-O-Methyl nucleotide
  modified_base 13: mod_base = OTHER; note = 2'-fluoro nucleotide
  modified_base 14: mod_base = OTHER; note = 2'-O-Methyl nucleotide
  modified_base 15: mod_base = OTHER; note = 2'-fluoro nucleotide
  modified_base 16: mod_base = OTHER; note = 2'-O-Methyl nucleotide
  modified_base 17: mod_base = OTHER; note = 2'-fluoro nucleotide
  modified_base 18: mod_base = OTHER; note = 2'-O-Methyl nucleotide
  modified_base 19: mod_base = OTHER; note = 2'-fluoro nucleotide
  modified_base 20: mod_base = OTHER; note = deoxy-thymine phosphorothioate
  misc_feature 1..19: note = RNA
  misc_feature 20..21: note = DNA
tgaaaaccgtaaaggaaattt

SEQ ID NO: 1953 - DNA, 21 bp, synthetic construct
  misc_feature 1..21: note = Description of Artificial Sequence: Synthetic oligonucleotide
  source 1..21: mol_type = other DNA
  modified_base 1: mod_base = OTHER; note = 2'-fluoro nucleotide
  modified_base 2: mod_base = OTHER; note = 2'-fluoro nucleotide
  modified_base 3: mod_base = OTHER; note = 2'-O-Methyl nucleotide
  modified_base 4: mod_base = OTHER; note = 2'-fluoro nucleotide
  modified_base 5: mod_base = OTHER; note = 2'-O-Methyl nucleotide
  modified_base 6: mod_base = OTHER; note = 2'-fluoro nucleotide
  modified_base 7: mod_base = OTHER; note = 2'-O-Methyl nucleotide
  modified_base 8: mod_base = OTHER; note = 2'-fluoro nucleotide
  modified_base 9: mod_base = OTHER; note = 2'-O-Methyl nucleotide
  modified_base 10: mod_base = OTHER; note = 2'-fluoro nucleotide
  modified_base 11: mod_base = OTHER; note = 2'-O-Methyl nucleotide
  modified_base 12: mod_base = OTHER; note = 2'-fluoro nucleotide
  modified_base 13: mod_base = OTHER; note = 2'-O-Methyl nucleotide
  modified_base 14: mod_base = OTHER; note = 2'-fluoro nucleotide
  modified_base 15: mod_base = OTHER; note = 2'-O-Methyl nucleotide
  modified_base 16: mod_base = OTHER; note = 2'-fluoro nucleotide
  modified_base 17: mod_base = OTHER; note = 2'-O-Methyl nucleotide
  modified_base 18: mod_base = OTHER; note = 2'-fluoro nucleotide
  modified_base 19: mod_base = OTHER; note = 2'-O-Methyl nucleotide
  modified_base 20: mod_base = OTHER; note = deoxy-thymine phosphorothioate
  misc_feature 1..19: note = RNA
  misc_feature 20..21: note = DNA
atttcctttacggttttcatt

SEQ ID NO: 1954 - DNA, 21 bp, synthetic construct
  misc_feature 1..21: note = Description of Artificial Sequence: Synthetic oligonucleotide
  source 1..21: mol_type = other DNA
  modified_base 1: mod_base = OTHER; note = 2'-O-Methyl nucleotide
  modified_base 2: mod_base = OTHER; note = 2'-O-Methyl nucleotide
  modified_base 3: mod_base = OTHER; note = 2'-fluoro nucleotide
  modified_base 4: mod_base = OTHER; note = 2'-O-Methyl nucleotide
  modified_base 5: mod_base = OTHER; note = 2'-fluoro nucleotide
  modified_base 6: mod_base = OTHER; note = 2'-O-Methyl nucleotide
  modified_base 7: mod_base = OTHER; note = 2'-fluoro nucleotide
  modified_base 8: mod_base = OTHER; note = 2'-O-Methyl nucleotide
  modified_base 9: mod_base = OTHER; note = 2'-fluoro nucleotide
  modified_base 10: mod_base = OTHER; note = 2'-O-Methyl nucleotide
  modified_base 11: mod_base = OTHER; note = 2'-fluoro nucleotide
  modified_base 12: mod_base = OTHER; note = 2'-O-Methyl nucleotide
  modified_base 13: mod_base = OTHER; note = 2'-fluoro nucleotide
  modified_base 14: mod_base = OTHER; note = 2'-O-Methyl nucleotide
  modified_base 15: mod_base = OTHER; note = 2'-fluoro nucleotide
  modified_base 16: mod_base = OTHER; note = 2'-O-Methyl nucleotide
  modified_base 17: mod_base = OTHER; note = 2'-fluoro nucleotide
  modified_base 18: mod_base = OTHER; note = 2'-O-Methyl nucleotide
  modified_base 19: mod_base = OTHER; note = 2'-fluoro nucleotide
  modified_base 20: mod_base = OTHER; note = deoxy-thymine phosphorothioate
  misc_feature 1..19: note = RNA
  misc_feature 20..21: note = DNA
gaaaaccgtaaaggaaatctt

SEQ ID NO: 1955 - DNA, 21 bp, synthetic construct
  misc_feature 1..21: note = Description of Artificial Sequence: Synthetic oligonucleotide
  source 1..21: mol_type = other DNA
  modified_base 1: mod_base = OTHER; note = 2'-fluoro nucleotide
  modified_base 2: mod_base = OTHER; note = 2'-fluoro nucleotide
  modified_base 3: mod_base = OTHER; note = 2'-O-Methyl nucleotide
  modified_base 4: mod_base = OTHER; note = 2'-fluoro nucleotide
  modified_base 5: mod_base = OTHER; note = 2'-O-Methyl nucleotide
  modified_base 6: mod_base = OTHER; note = 2'-fluoro nucleotide
  modified_base 7: mod_base = OTHER; note = 2'-O-Methyl nucleotide
  modified_base 8: mod_base = OTHER; note = 2'-fluoro nucleotide
  modified_base 9: mod_base = OTHER; note = 2'-O-Methyl nucleotide
  modified_base 10: mod_base = OTHER; note = 2'-fluoro nucleotide
  modified_base 11: mod_base = OTHER; note = 2'-O-Methyl nucleotide
  modified_base 12: mod_base = OTHER; note = 2'-fluoro nucleotide
  modified_base 13: mod_base = OTHER; note = 2'-O-Methyl nucleotide
  modified_base 14: mod_base = OTHER; note = 2'-fluoro nucleotide
  modified_base 15: mod_base = OTHER; note = 2'-O-Methyl nucleotide
  modified_base 16: mod_base = OTHER; note = 2'-fluoro nucleotide
  modified_base 17: mod_base = OTHER; note = 2'-O-Methyl nucleotide
  modified_base 18: mod_base = OTHER; note = 2'-fluoro nucleotide
  modified_base 19: mod_base = OTHER; note = 2'-O-Methyl nucleotide
  modified_base 20: mod_base = OTHER; note = deoxy-thymine phosphorothioate
  misc_feature 1..19: note = RNA
  misc_feature 20..21: note = DNA
gatttcctttacggttttctt

SEQ ID NO: 1956 - RNA, 23 nt, Homo sapiens
  source 1..23: mol_type = unassigned RNA
caaaggttctctgctagacgaca

SEQ ID NO: 1957 - RNA, 23 nt, Homo sapiens
  source 1..23: mol_type = unassigned RNA
tctgggtgtcactatggagctct

SEQ ID NO: 1958 - RNA, 23 nt, Homo sapiens
  source 1..23: mol_type = unassigned RNA
ctgggtgtcactatggagctctc

SEQ ID NO: 1959 - RNA, 23 nt, Homo sapiens
  source 1..23: mol_type = unassigned RNA
gggtgtcactatggagctctcac

SEQ ID NO: 1960 - RNA, 23 nt, Homo sapiens
  source 1..23: mol_type = unassigned RNA
tactacaactttccactggctct

SEQ ID NO: 1961 - RNA, 23 nt, Homo sapiens
  source 1..23: mol_type = unassigned RNA
aagcttctgggtgtcactatgga

SEQ ID NO: 1962 - RNA, 23 nt, Homo sapiens
  source 1..23: mol_type = unassigned RNA
cttctgggtgtcactatggagct

SEQ ID NO: 1963 - RNA, 21 nt, Homo sapiens
  source 1..21: mol_type = unassigned RNA
ctgttggattgattcgaaatt

SEQ ID NO: 1964 - RNA, 21 nt, Homo sapiens
  source 1..21: mol_type = unassigned RNA
tttcgaatcaatccaacagtt

SEQ ID NO: 1965 - RNA, 21 nt, Homo sapiens
  source 1..21: mol_type = unassigned RNA
acgactagttcagttgctttt

SEQ ID NO: 1966 - RNA, 21 nt, Homo sapiens
  source 1..21: mol_type = unassigned RNA
aagcaactgaactagtcgttt

SEQ ID NO: 1967 - RNA, 23 nt, synthetic construct
  misc_feature 1..23: note = Description of Artificial Sequence: Synthetic oligonucleotide
  source 1..23: mol_type = other RNA
  modified_base 1: mod_base = OTHER; note = inverted abasic nucleotide
  modified_base 2: mod_base = OTHER; note = 2'-O-Methyl nucleotide phosphorothioate
  modified_base 3: mod_base = OTHER; note = 2'-O-Methyl nucleotide
  modified_base 4: mod_base = OTHER; note = 2'-fluoro nucleotide
  modified_base 5: mod_base = OTHER; note = 2'-O-Methyl nucleotide
  modified_base 6: mod_base = OTHER; note = 2'-fluoro nucleotide
  modified_base 7: mod_base = OTHER; note = 2'-O-Methyl nucleotide
  modified_base 8: mod_base = OTHER; note = 2'-fluoro nucleotide
  modified_base 9: mod_base = OTHER; note = 2'-O-Methyl nucleotide
  modified_base 10: mod_base = OTHER; note = 2'-fluoro nucleotide
  modified_base 11: mod_base = OTHER; note = 2'-O-Methyl nucleotide
  modified_base 12: mod_base = OTHER; note = 2'-fluoro nucleotide
  modified_base 13: mod_base = OTHER; note = 2'-O-Methyl nucleotide
  modified_base 14: mod_base = OTHER; note = 2'-fluoro nucleotide
  modified_base 15: mod_base = OTHER; note = 2'-O-Methyl nucleotide
  modified_base 16: mod_base = OTHER; note = 2'-fluoro nucleotide
  modified_base 17: mod_base = OTHER; note = 2'-O-Methyl nucleotide
  modified_base 18: mod_base = OTHER; note = 2'-fluoro nucleotide
  modified_base 19: mod_base = OTHER; note = 2'-O-Methyl nucleotide
  modified_base 20: mod_base = OTHER; note = 2'-fluoro nucleotide
  modified_base 21: mod_base = OTHER; note = 2'-O-Methyl nucleotide phosphorothioate
  modified_base 22: mod_base = OTHER; note = 2'-O-Methyl nucleotide
  modified_base 23: mod_base = OTHER; note = inverted abasic nucleotide
nctgttggattgattcgaaattn

SEQ ID NO: 1968 - RNA, 21 nt, synthetic construct
  misc_feature 1..21: note = Description of Artificial Sequence: Synthetic oligonucleotide
  source 1..21: mol_type = other RNA
  modified_base 1: mod_base = OTHER; note = 2'-O-Methyl nucleotide phosphorothioate
  modified_base 2: mod_base = OTHER; note = 2'-fluoro nucleotide phosphorothioate
  modified_base 3: mod_base = OTHER; note = 2'-O-Methyl nucleotide phosphorothioate
  modified_base 4: mod_base = OTHER; note = 2'-fluoro nucleotide
  modified_base 5: mod_base = OTHER; note = 2'-O-Methyl nucleotide
  modified_base 6: mod_base = OTHER; note = 2'-fluoro nucleotide
  modified_base 7: mod_base = OTHER; note = 2'-O-Methyl nucleotide
  modified_base 8: mod_base = OTHER; note = 2'-fluoro nucleotide
  modified_base 9: mod_base = OTHER; note = 2'-O-Methyl nucleotide
  modified_base 10: mod_base = OTHER; note = 2'-fluoro nucleotide
  modified_base 11: mod_base = OTHER; note = 2'-O-Methyl nucleotide
  modified_base 12: mod_base = OTHER; note = 2'-fluoro nucleotide
  modified_base 13: mod_base = OTHER; note = 2'-O-Methyl nucleotide
  modified_base 14: mod_base = OTHER; note = 2'-fluoro nucleotide
  modified_base 15: mod_base = OTHER; note = 2'-O-Methyl nucleotide
  modified_base 16: mod_base = OTHER; note = 2'-fluoro nucleotide
  modified_base 17: mod_base = OTHER; note = 2'-O-Methyl nucleotide
  modified_base 18: mod_base = OTHER; note = 2'-fluoro nucleotide
  modified_base 19: mod_base = OTHER; note = 2'-O-Methyl nucleotide
  modified_base 20: mod_base = OTHER; note = 2'-O-Methyl nucleotide phosphorothioate
  modified_base 21: mod_base = OTHER; note = 2'-O-Methyl nucleotide
tttcgaatcaatccaacagtt

SEQ ID NO: 1969 - RNA, 23 nt, synthetic construct
  misc_feature 1..23: note = Description of Artificial Sequence: Synthetic oligonucleotide
  source 1..23: mol_type = other RNA
  modified_base 1: mod_base = OTHER; note = inverted abasic nucleotide
  modified_base 2: mod_base = OTHER; note = 2'-O-Methyl nucleotide phosphorothioate
  modified_base 3: mod_base = OTHER; note = 2'-O-Methyl nucleotide
  modified_base 4: mod_base = OTHER; note = 2'-fluoro nucleotide
  modified_base 5: mod_base = OTHER; note = 2'-O-Methyl nucleotide
  modified_base 6: mod_base = OTHER; note = 2'-fluoro nucleotide
  modified_base 7: mod_base = OTHER; note = 2'-O-Methyl nucleotide
  modified_base 8: mod_base = OTHER; note = 2'-fluoro nucleotide
  modified_base 9: mod_base = OTHER; note = 2'-O-Methyl nucleotide
  modified_base 10: mod_base = OTHER; note = 2'-fluoro nucleotide
  modified_base 11: mod_base = OTHER; note = 2'-O-Methyl nucleotide
  modified_base 12: mod_base = OTHER; note = 2'-fluoro nucleotide
  modified_base 13: mod_base = OTHER; note = 2'-O-Methyl nucleotide
  modified_base 14: mod_base = OTHER; note = 2'-fluoro nucleotide
  modified_base 15: mod_base = OTHER; note = 2'-O-Methyl nucleotide
  modified_base 16: mod_base = OTHER; note = 2'-fluoro nucleotide
  modified_base 17: mod_base = OTHER; note = 2'-O-Methyl nucleotide
  modified_base 18: mod_base = OTHER; note = 2'-fluoro nucleotide
  modified_base 19: mod_base = OTHER; note = 2'-O-Methyl nucleotide
  modified_base 20: mod_base = OTHER; note = 2'-fluoro nucleotide
  modified_base 21: mod_base = OTHER; note = 2'-O-Methyl nucleotide phosphorothioate
  modified_base 22: mod_base = OTHER; note = 2'-O-Methyl nucleotide
  modified_base 23: mod_base = OTHER; note = inverted abasic nucleotide
nacgactagttcagttgcttttn

SEQ ID NO: 1970 - RNA, 21 nt, synthetic construct
  misc_feature 1..21: note = Description of Artificial Sequence: Synthetic oligonucleotide
  source 1..21: mol_type = other RNA
  modified_base 1: mod_base = OTHER; note = 2'-O-Methyl nucleotide phosphorothioate
  modified_base 2: mod_base = OTHER; note = 2'-fluoro nucleotide phosphorothioate
  modified_base 3: mod_base = OTHER; note = 2'-O-Methyl nucleotide phosphorothioate
  modified_base 4: mod_base = OTHER; note = 2'-fluoro nucleotide
  modified_base 5: mod_base = OTHER; note = 2'-O-Methyl nucleotide
  modified_base 6: mod_base = OTHER; note = 2'-fluoro nucleotide
  modified_base 7: mod_base = OTHER; note = 2'-O-Methyl nucleotide
  modified_base 8: mod_base = OTHER; note = 2'-fluoro nucleotide
  modified_base 9: mod_base = OTHER; note = 2'-O-Methyl nucleotide
  modified_base 10: mod_base = OTHER; note = 2'-fluoro nucleotide
  modified_base 11: mod_base = OTHER; note = 2'-O-Methyl nucleotide
  modified_base 12: mod_base = OTHER; note = 2'-fluoro nucleotide
  modified_base 13: mod_base = OTHER; note = 2'-O-Methyl nucleotide
  modified_base 14: mod_base = OTHER; note = 2'-fluoro nucleotide
  modified_base 15: mod_base = OTHER; note = 2'-O-Methyl nucleotide
  modified_base 16: mod_base = OTHER; note = 2'-fluoro nucleotide
  modified_base 17: mod_base = OTHER; note = 2'-O-Methyl nucleotide
  modified_base 18: mod_base = OTHER; note = 2'-fluoro nucleotide
  modified_base 19: mod_base = OTHER; note = 2'-O-Methyl nucleotide
  modified_base 20: mod_base = OTHER; note = 2'-O-Methyl nucleotide phosphorothioate
  modified_base 21: mod_base = OTHER; note = 2'-O-Methyl nucleotide
aagcaactgaactagtcgttt

SEQ ID NO: 1971 - DNA, 21 bp, synthetic construct
  misc_feature 1..21: note = Description of Artificial Sequence: Synthetic oligonucleotide
  source 1..21: mol_type = other DNA
  modified_base 20: mod_base = OTHER; note = deoxy-thymine phosphorothioate
  misc_feature 1..19: note = RNA
  misc_feature 20..21: note = DNA
gctcaaagcaatttctacatt

SEQ ID NO: 1972 - DNA, 21 bp, synthetic construct
  misc_feature 1..21: note = Description of Artificial Sequence: Synthetic oligonucleotide
  source 1..21: mol_type = other DNA
  modified_base 20: mod_base = OTHER; note = deoxy-thymine phosphorothioate
  misc_feature 1..19: note = RNA
  misc_feature 20..21: note = DNA
tgtagaaattgctttgagctt

SEQ ID NO: 1973 - DNA, 21 bp, synthetic construct
  misc_feature 1..21: note = Description of Artificial Sequence: Synthetic oligonucleotide
  source 1..21: mol_type = other DNA
  modified_base 20: mod_base = OTHER; note = deoxy-thymine phosphorothioate
  misc_feature 1..19: note = RNA
  misc_feature 20..21: note = DNA
ggatgaaacacaaaaggtatt

SEQ ID NO: 1974 - DNA, 21 bp, synthetic construct
  misc_feature 1..21: note = Description of Artificial Sequence: Synthetic oligonucleotide
  source 1..21: mol_type = other DNA
  modified_base 20: mod_base = OTHER; note = deoxy-thymine phosphorothioate
  misc_feature 1..19: note = RNA
  misc_feature 20..21: note = DNA
taccttttgtgtttcatcctt

SEQ ID NO: 1975 - DNA, 21 bp, synthetic construct
  misc_feature 1..21: note = Description of Artificial Sequence: Synthetic oligonucleotide
  source 1..21: mol_type = other DNA
  modified_base 20: mod_base = OTHER; note = deoxy-thymine phosphorothioate
  misc_feature 1..19: note = RNA
  misc_feature 20..21: note = DNA
tgtcagagttactgtttcatt

SEQ ID NO: 1976 - DNA, 21 bp, synthetic construct
  misc_feature 1..21: note = Description of Artificial Sequence: Synthetic oligonucleotide
  source 1..21: mol_type = other DNA
  modified_base 20: mod_base = OTHER; note = deoxy-thymine phosphorothioate
  misc_feature 1..19: note = RNA
  misc_feature 20..21: note = DNA
tgaaacagtaactctgacatt

SEQ ID NO: 1977 - DNA, 21 bp, synthetic construct
  misc_feature 1..21: note = Description of Artificial Sequence: Synthetic oligonucleotide
  source 1..21: mol_type = other DNA
  modified_base 20: mod_base = OTHER; note = deoxy-thymine phosphorothioate
  misc_feature 1..19: note = RNA
  misc_feature 20..21: note = DNA
agcaagaacagaaataaaatt

SEQ ID NO: 1978 - DNA, 21 bp, synthetic construct
  misc_feature 1..21: note = Description of Artificial Sequence: Synthetic oligonucleotide
  source 1..21: mol_type = other DNA
  modified_base 20: mod_base = OTHER; note = deoxy-thymine phosphorothioate
  misc_feature 1..19: note = RNA
  misc_feature 20..21: note = DNA
ttttatttctgttcttgcttt

SEQ ID NO: 1979 - DNA, 21 bp, synthetic construct
  misc_feature 1..21: note = Description of Artificial Sequence: Synthetic oligonucleotide
  source 1..21: mol_type = other DNA
  modified_base 20: mod_base = OTHER; note = deoxy-thymine phosphorothioate
  misc_feature 1..19: note = RNA
  misc_feature 20..21: note = DNA
ctagttcatttcaaaattatt

SEQ ID NO: 1980 - DNA, 21 bp, synthetic construct
  misc_feature 1..21: note = Description of Artificial Sequence: Synthetic oligonucleotide
  source 1..21: mol_type = other DNA
  modified_base 20: mod_base = OTHER; note = deoxy-thymine phosphorothioate
  misc_feature 1..19: note = RNA
  misc_feature 20..21: note = DNA
taattttgaaatgaactagtt

SEQ ID NO: 1981 - DNA, 21 bp, synthetic construct
  misc_feature 1..21: note = Description of Artificial Sequence: Synthetic oligonucleotide
  source 1..21: mol_type = other DNA
  modified_base 20: mod_base = OTHER; note = deoxy-thymine phosphorothioate
  misc_feature 1..19: note = RNA
  misc_feature 20..21: note = DNA
caagttcacaattacccaatt

SEQ ID NO: 1982 - DNA, 21 bp, synthetic construct
  misc_feature 1..21: note = Description of Artificial Sequence: Synthetic oligonucleotide
  source 1..21: mol_type = other DNA
  modified_base 20: mod_base = OTHER; note = deoxy-thymine phosphorothioate
  misc_feature 1..19: note = RNA
  misc_feature 20..21: note = DNA
ttgggtaattgtgaacttgtt

SEQ ID NO: 1983 - DNA, 21 bp, synthetic construct
  misc_feature 1..21: note = Description of Artificial Sequence: Synthetic oligonucleotide
  source 1..21: mol_type = other DNA
  modified_base 20: mod_base = OTHER; note = deoxy-thymine phosphorothioate
  misc_feature 1..19: note = RNA
  misc_feature 20..21: note = DNA
gcttgaagatgaaacacgatt

SEQ ID NO: 1984 - DNA, 21 bp, synthetic construct
  misc_feature 1..21: note = Description of Artificial Sequence: Synthetic oligonucleotide
  source 1..21: mol_type = other DNA
  modified_base 20: mod_base = OTHER; note = deoxy-thymine phosphorothioate
  misc_feature 1..19: note = RNA
  misc_feature 20..21: note = DNA
tcgtgtttcatcttcaagctt

SEQ ID NO: 1985 - DNA, 21 bp, synthetic construct
  misc_feature 1..21: note = Description of Artificial Sequence: Synthetic oligonucleotide
  source 1..21: mol_type = other DNA
  modified_base 20: mod_base = OTHER; note = deoxy-thymine phosphorothioate
  misc_feature 1..19: note = RNA
  misc_feature 20..21: note = DNA
agatcaagaaaatgtatgatt

SEQ ID NO: 1986 - DNA, 21 bp, synthetic construct
  misc_feature 1..21: note = Description of Artificial Sequence: Synthetic oligonucleotide
  source 1..21: mol_type = other DNA
  modified_base 20: mod_base = OTHER; note = deoxy-thymine phosphorothioate
  misc_feature 1..19: note = RNA
  misc_feature 20..21: note = DNA
tcatacattttcttgatcttt

SEQ ID NO: 1987 - DNA, 21 bp, synthetic construct
  misc_feature 1..21: note = Description of Artificial Sequence: Synthetic oligonucleotide
  source 1..21: mol_type = other DNA
  modified_base 20: mod_base = OTHER; note = deoxy-thymine phosphorothioate
  misc_feature 1..19: note = RNA
  misc_feature 20..21: note = DNA
ccaaagaaaacacgaattatt

SEQ ID NO: 1988 - DNA, 21 bp, synthetic construct
  misc_feature 1..21: note = Description of Artificial Sequence: Synthetic oligonucleotide
  source 1..21: mol_type = other DNA
  modified_base 20: mod_base = OTHER; note = deoxy-thymine phosphorothioate
  misc_feature 1..19: note = RNA
  misc_feature 20..21: note = DNA
taattcgtgttttctttggtt

SEQ ID NO: 1989 - DNA, 21 bp, synthetic construct
  misc_feature 1..21: note = Description of Artificial Sequence: Synthetic oligonucleotide
  source 1..21: mol_type = other DNA
  modified_base 20: mod_base = OTHER; note = deoxy-thymine phosphorothioate
  misc_feature 1..19: note = RNA
  misc_feature 20..21: note = DNA
cttcgataagattattgaatt

SEQ ID NO: 1990 - DNA, 21 bp, synthetic construct
  misc_feature 1..21: note = Description of Artificial Sequence: Synthetic oligonucleotide
  source 1..21: mol_type = other DNA
  modified_base 20: mod_base = OTHER; note = deoxy-thymine phosphorothioate
  misc_feature 1..19: note = RNA
  misc_feature 20..21: note = DNA
ttcaataatcttatcgaagtt

SEQ ID NO: 1991 - DNA, 21 bp, synthetic construct
  misc_feature 1..21: note = Description of Artificial Sequence: Synthetic oligonucleotide
  source 1..21: mol_type = other DNA
  modified_base 20: mod_base = OTHER; note = deoxy-thymine phosphorothioate
  misc_feature 1..19: note = RNA
  misc_feature 20..21: note = DNA
aggaactatgacctcgacttt

SEQ ID NO: 1992 - DNA, 21 bp, synthetic construct
  misc_feature 1..21: note = Description of Artificial Sequence: Synthetic oligonucleotide
  source 1..21: mol_type = other DNA
  modified_base 20: mod_base = OTHER; note = deoxy-thymine phosphorothioate
  misc_feature 1..19: note = RNA
  misc_feature 20..21: note = DNA
agtcgaggtcatagttccttt

SEQ ID NO: 1993 - DNA, 21 bp, synthetic construct
  misc_feature 1..21: note = Description of Artificial Sequence: Synthetic oligonucleotide
  source 1..21: mol_type = other DNA
  modified_base 20: mod_base = OTHER; note = deoxy-thymine phosphorothioate
  misc_feature 1..19: note = RNA
  misc_feature 20..21: note = DNA
acgacgagaccttcatcaatt

SEQ ID NO: 1994 - DNA, 21 bp, synthetic construct
  misc_feature 1..21: note = Description of Artificial Sequence: Synthetic oligonucleotide
  source 1..21: mol_type = other DNA
  modified_base 20: mod_base = OTHER; note = deoxy-thymine phosphorothioate
  misc_feature 1..19: note = RNA
  misc_feature 20..21: note = DNA
ttgatgaaggtctcgtcgttt

SEQ ID NO: 1995 - DNA, 21 bp, synthetic construct
  misc_feature 1..21: note = Description of Artificial Sequence: Synthetic oligonucleotide
  source 1..21: mol_type = other DNA
  modified_base 20: mod_base = OTHER; note = deoxy-thymine phosphorothioate
  misc_feature 1..19: note = RNA
  misc_feature 20..21: note = DNA
aagatgaggaagaaatcgatt

SEQ ID NO: 1996 - DNA, 21 bp, synthetic construct
  misc_feature 1..21: note = Description of Artificial Sequence: Synthetic oligonucleotide
  source 1..21: mol_type = other DNA
  modified_base 20: mod_base = OTHER; note = deoxy-thymine phosphorothioate
  misc_feature 1..19: note = RNA
  misc_feature 20..21: note = DNA
tcgatttcttcctcatctttt

SEQ ID NO: 1997 - DNA, 21 bp, synthetic construct
  misc_feature 1..21: note = Description of Artificial Sequence: Synthetic oligonucleotide
  source 1..21: mol_type = other DNA
  modified_base 20: mod_base = OTHER; note = deoxy-thymine phosphorothioate
  misc_feature 1..19: note = RNA
  misc_feature 20..21: note = DNA
aggaagaaatcgatgttgttt

SEQ ID NO: 1998 - DNA, 21 bp, synthetic construct
  misc_feature 1..21: note = Description of Artificial Sequence: Synthetic oligonucleotide
  source 1..21: mol_type = other DNA
  modified_base 20: mod_base = OTHER; note = deoxy-thymine phosphorothioate
  misc_feature 1..19: note = RNA
  misc_feature 20..21: note = DNA
acaacatcgatttcttccttt

SEQ ID NO: 1999 - DNA, 21 bp, synthetic construct
  misc_feature 1..21: note = Description of Artificial Sequence: Synthetic oligonucleotide
  source 1..21: mol_type = other DNA
  modified_base 20: mod_base = OTHER; note = deoxy-thymine phosphorothioate
  misc_feature 1..19: note = RNA
  misc_feature 20..21: note = DNA
agcttttttgccctgcgtgtt

SEQ ID NO: 2000 - DNA, 21 bp, synthetic construct
  misc_feature 1..21: note = Description of Artificial Sequence: Synthetic oligonucleotide
  source 1..21: mol_type = other DNA
  modified_base 20: mod_base = OTHER; note = deoxy-thymine phosphorothioate
  misc_feature 1..19: note = RNA
  misc_feature 20..21: note = DNA
cacgcagggcaaaaaagcttt

SEQ ID NO: 2001 - DNA, 21 bp, synthetic construct
  misc_feature 1..21: note = Description of Artificial Sequence: Synthetic oligonucleotide
  source 1..21: mol_type = other DNA
  modified_base 20: mod_base = OTHER; note = deoxy-thymine phosphorothioate
  misc_feature 1..19: note = RNA
  misc_feature 20..21: note = DNA
aggtagttatccttaaaaatt

SEQ ID NO: 2002 - DNA, 21 bp, synthetic construct
  misc_feature 1..21: note = Description of Artificial Sequence: Synthetic oligonucleotide
  source 1..21: mol_type = other DNA
  modified_base 20: mod_base = OTHER; note = deoxy-thymine phosphorothioate
  misc_feature 1..19: note = RNA
  misc_feature 20..21: note = DNA
tttttaaggataactaccttt

SEQ ID NO: 2003 - DNA, 97 bp, Homo sapiens
  source 1..97: mol_type = unassigned DNA
tgctgttgacagtgagcgccagctcaaagcaatttctacatagtgaagccacagatgtatgtagaaattgctttgagctgttgcctactgcctcgga

SEQ ID NO: 2004 - DNA, 97 bp, Homo sapiens
  source 1..97: mol_type = unassigned DNA
tgctgttgacagtgagcgaaaggatgaaacacaaaaggtatagtgaagccacagatgtataccttttgtgtttcatccttctgcctactgcctcgga

SEQ ID NO: 2005 - DNA, 97 bp, Homo sapiens
  source 1..97: mol_type = unassigned DNA
tgctgttgacagtgagcgccatgtcagagttactgtttcatagtgaagccacagatgtatgaaacagtaactctgacatgatgcctactgcctcgga

SEQ ID NO: 2006 - DNA, 97 bp, Homo sapiens
  source 1..97: mol_type = unassigned DNA
tgctgttgacagtgagcgcaactagttcatttcaaaattatagtgaagccacagatgtataattttgaaatgaactagttttgcctactgcctcgga

SEQ ID NO: 2007 - DNA, 97 bp, Homo sapiens
  source 1..97: mol_type = unassigned DNA
tgctgttgacagtgagcgcacagcaagaacagaaataaaatagtgaagccacagatgtattttatttctgttcttgctgtatgcctactgcctcgga

SEQ ID NO: 2008 - DNA, 97 bp, Homo sapiens
  source 1..97: mol_type = unassigned DNA
tgctgttgacagtgagcgacaagatcaagaaaatgtatgatagtgaagccacagatgtatcatacattttcttgatcttgctgcctactgcctcgga

SEQ ID NO: 2009 - DNA, 97 bp, Homo sapiens
  source 1..97: mol_type = unassigned DNA
tgctgttgacagtgagcgcagcaagttcacaattacccaatagtgaagccacagatgtattgggtaattgtgaacttgctttgcctactgcctcgga

SEQ ID NO: 2010 - DNA, 97 bp, Homo sapiens
  source 1..97: mol_type = unassigned DNA
tgctgttgacagtgagcgccccttcgataagattattgaatagtgaagccacagatgtattcaataatcttatcgaagggatgcctactgcctcgga

SEQ ID NO: 2011 - DNA, 97 bp, Homo sapiens
  source 1..97: mol_type = unassigned DNA
tgctgttgacagtgagcgagagcttgaagatgaaacacgatagtgaagccacagatgtatcgtgtttcatcttcaagctcctgcctactgcctcgga

SEQ ID NO: 2012 - DNA, 97 bp, Homo sapiens
  source 1..97: mol_type = unassigned DNA
tgctgttgacagtgagcgacaccaaagaaaacacgaattatagtgaagccacagatgtataattcgtgttttctttggtggtgcctactgcctcgga

SEQ ID NO: 2013 - RNA, 22 nt, synthetic construct
  misc_feature 1..22: note = Description of Artificial Sequence: Synthetic oligonucleotide
  source 1..22: mol_type = other RNA
tgtagaaattgctttgagctgt

SEQ ID NO: 2014 - RNA, 22 nt, synthetic construct
  misc_feature 1..22: note = Description of Artificial Sequence: Synthetic oligonucleotide
  source 1..22: mol_type = other RNA
agctcaaagcaatttctacata

SEQ ID NO: 2015 - RNA, 22 nt, synthetic construct
  misc_feature 1..22: note = Description of Artificial Sequence: Synthetic oligonucleotide
  source 1..22: mol_type = other RNA
taccttttgtgtttcatccttc

SEQ ID NO: 2016 - RNA, 22 nt, synthetic construct
  misc_feature 1..22: note = Description of Artificial Sequence: Synthetic oligonucleotide
  source 1..22: mol_type = other RNA
aggatgaaacacaaaaggtata

SEQ ID NO: 2017 - RNA, 22 nt, synthetic construct
  misc_feature 1..22: note = Description of Artificial Sequence: Synthetic oligonucleotide
  source 1..22: mol_type = other RNA
tgaaacagtaactctgacatga

SEQ ID NO: 2018 - RNA, 22 nt, synthetic construct
  misc_feature 1..22: note = Description of Artificial Sequence: Synthetic oligonucleotide
  source 1..22: mol_type = other RNA
atgtcagagttactgtttcata

SEQ ID NO: 2019 - RNA, 22 nt, synthetic construct
  misc_feature 1..22: note = Description of Artificial Sequence: Synthetic oligonucleotide
  source 1..22: mol_type = other RNA
taattttgaaatgaactagttt

SEQ ID NO: 2020 - RNA, 22 nt, synthetic construct
  misc_feature 1..22: note = Description of Artificial Sequence: Synthetic oligonucleotide
  source 1..22: mol_type = other RNA
actagttcatttcaaaattata

SEQ ID NO: 2021 - RNA, 22 nt, synthetic construct
  misc_feature 1..22: note = Description of Artificial Sequence: Synthetic oligonucleotide
  source 1..22: mol_type = other RNA
ttttatttctgttcttgctgta

SEQ ID NO: 2022 - RNA, 22 nt, synthetic construct
  misc_feature 1..22: note = Description of Artificial Sequence: Synthetic oligonucleotide
  source 1..22: mol_type = other RNA
cagcaagaacagaaataaaata

SEQ ID NO: 2023 - RNA, 22 nt, synthetic construct
  misc_feature 1..22: note = Description of Artificial Sequence: Synthetic oligonucleotide
  source 1..22: mol_type = other RNA
tcatacattttcttgatcttgc

SEQ ID NO: 2024 - RNA, 22 nt, synthetic construct
  misc_feature 1..22: note = Description of Artificial Sequence: Synthetic oligonucleotide
  source 1..22: mol_type = other RNA
aagatcaagaaaatgtatgata

SEQ ID NO: 2025 - RNA, 22 nt, synthetic construct
  misc_feature 1..22: note = Description of Artificial Sequence: Synthetic oligonucleotide
  source 1..22: mol_type = other RNA
ttgggtaattgtgaacttgctt

SEQ ID NO: 2026 - RNA, 22 nt, synthetic construct
  misc_feature 1..22: note = Description of Artificial Sequence: Synthetic oligonucleotide
  source 1..22: mol_type = other RNA
gcaagttcacaattacccaata

SEQ ID NO: 2027 - RNA, 22 nt, synthetic construct
  misc_feature 1..22: note = Description of Artificial Sequence: Synthetic oligonucleotide
  source 1..22: mol_type = other RNA
ttcaataatcttatcgaaggga

SEQ ID NO: 2028 - RNA, 22 nt, synthetic construct
  misc_feature 1..22: note = Description of Artificial Sequence: Synthetic oligonucleotide
  source 1..22: mol_type = other RNA
ccttcgataagattattgaata

SEQ ID NO: 2029 - RNA, 22 nt, synthetic construct
  misc_feature 1..22: note = Description of Artificial Sequence: Synthetic oligonucleotide
  source 1..22: mol_type = other RNA
tcgtgtttcatcttcaagctcc

SEQ ID NO: 2030 - RNA, 22 nt, synthetic construct
  misc_feature 1..22: note = Description of Artificial Sequence: Synthetic oligonucleotide
  source 1..22: mol_type = other RNA
agcttgaagatgaaacacgata

SEQ ID NO: 2031 - RNA, 22 nt, synthetic construct
  misc_feature 1..22: note = Description of Artificial Sequence: Synthetic oligonucleotide
  source 1..22: mol_type = other RNA
taattcgtgttttctttggtgg

SEQ ID NO: 2032 - RNA, 22 nt, synthetic construct
  misc_feature 1..22: note = Description of Artificial Sequence: Synthetic oligonucleotide
  source 1..22: mol_type = other RNA
accaaagaaaacacgaattata

SEQ ID NO: 2033 - RNA, 21 nt, synthetic construct
  misc_feature 1..21: note = Description of Artificial Sequence: Synthetic oligonucleotide
  source 1..21: mol_type = other RNA
tgaattagctgtatcgtcatt

SEQ ID NO: 2034 - DNA, 51 bp, synthetic construct
  misc_feature 1..51: note = Description of Artificial Sequence: Synthetic oligonucleotide
  source 1..51: mol_type = other DNA
gtcgtatccagtgcagggtccgaggtattcgcactggatacgacaatgacg

SEQ ID NO: 2035 - DNA, 23 bp, synthetic construct
  misc_feature 1..23: note = Description of Artificial Sequence: Synthetic primer
  source 1..23: mol_type = other DNA
ggcggctgaattagctgtatcgt

SEQ ID NO: 2036 - DNA, 15 bp, synthetic construct
  misc_feature 1..15: note = Description of Artificial Sequence: Synthetic primer
  source 1..15: mol_type = other DNA
agtgcagggtccgag

SEQ ID NO: 2037 - DNA, 16 bp, synthetic construct
  misc_feature 1..16: note = Description of Artificial Sequence: Synthetic probe
  source 1..16: mol_type = other DNA
  modified_base 1: mod_base = OTHER; note = 6-Carboxyfluorescein
  modified_base 16: mod_base = OTHER; note = Nonfluorescent quencher (NFQ)- minor groove binder (MGB) probe modified nucleotide
tggatacgacaatgac

SEQ ID NO: 2038 - RNA, 21 nt, synthetic construct
  misc_feature 1..21: note = Description of Artificial Sequence: Synthetic oligonucleotide
  source 1..21: mol_type = other RNA
actcgtgccttggcaaacttt

SEQ ID NO: 2039 - DNA, 52 bp, synthetic construct
  misc_feature 1..52: note = Description of Artificial Sequence: Synthetic oligonucleotide
  source 1..52: mol_type = other DNA
gtcgtatccagtgcagggtccgaggtattcgcactggatacgacaaagtttg

SEQ ID NO: 2040 - DNA, 21 bp, synthetic construct
  misc_feature 1..21: note = Description of Artificial Sequence: Synthetic primer
  source 1..21: mol_type = other DNA
ggcggcactcgtgccttggca

SEQ ID NO: 2041 - DNA, 15 bp, synthetic construct
  misc_feature 1..15: note = Description of Artificial Sequence: Synthetic primer
  source 1..15: mol_type = other DNA
agtgcagggtccgag

SEQ ID NO: 2042 - DNA, 16 bp, synthetic construct
  misc_feature 1..16: note = Description of Artificial Sequence: Synthetic probe
  source 1..16: mol_type = other DNA
  modified_base 1: mod_base = OTHER; note = 6-Carboxyfluorescein
  modified_base 16: mod_base = OTHER; note = Nonfluorescent quencher (NFQ)- minor groove binder (MGB) probe modified nucleotide
tggatacgacaaagtt

SEQ ID NO: 2043 - DNA, 21 bp, synthetic construct
  misc_feature 1..21: note = Description of Artificial Sequence: Synthetic primer
  source 1..21: mol_type = other DNA
cgccttgacgatacagctaat

SEQ ID NO: 2044 - DNA, 23 bp, synthetic construct
  misc_feature 1..23: note = Description of Artificial Sequence: Synthetic primer
  source 1..23: mol_type = other DNA
tgtttcctgtaggagtcctctat

SEQ ID NO: 2045 - skipped

SEQ ID NO: 2046 - DNA, 22 bp, synthetic construct
  misc_feature 1..22: note = Description of Artificial Sequence: Synthetic primer
  source 1..22: mol_type = other DNA
gtgccttgacgatacagctaat

SEQ ID NO: 2047 - DNA, 22 bp, synthetic construct
  misc_feature 1..22: note = Description of Artificial Sequence: Synthetic primer
  source 1..22: mol_type = other DNA
ccaagagacaggtttctccatc

SEQ ID NO: 2048 - skipped

SEQ ID NO: 2049 - RNA, 23 nt, synthetic construct
  misc_feature 1..23: note = Description of Artificial Sequence: Synthetic oligonucleotide
  source 1..23: mol_type = other RNA
  modified_base 1: mod_base = OTHER; note = Cholesterol-inverted abasic nucleotide
  modified_base 2: mod_base = OTHER; note = 2'-O-Methyl nucleotide phosphorothioate
  modified_base 3: mod_base = OTHER; note = 2'-O-Methyl nucleotide
  modified_base 4: mod_base = OTHER; note = 2'-fluoro nucleotide
  modified_base 5: mod_base = OTHER; note = 2'-O-Methyl nucleotide
  modified_base 6: mod_base = OTHER; note = 2'-fluoro nucleotide
  modified_base 7: mod_base = OTHER; note = 2'-O-Methyl nucleotide
  modified_base 8: mod_base = OTHER; note = 2'-fluoro nucleotide
  modified_base 9: mod_base = OTHER; note = 2'-O-Methyl nucleotide
  modified_base 10: mod_base = OTHER; note = 2'-fluoro nucleotide
  modified_base 11: mod_base = OTHER; note = 2'-O-Methyl nucleotide
  modified_base 12: mod_base = OTHER; note = 2'-fluoro nucleotide
  modified_base 13: mod_base = OTHER; note = 2'-O-Methyl nucleotide
  modified_base 14: mod_base = OTHER; note = 2'-fluoro nucleotide
  modified_base 15: mod_base = OTHER; note = 2'-O-Methyl nucleotide
  modified_base 16: mod_base = OTHER; note = 2'-fluoro nucleotide
  modified_base 17: mod_base = OTHER; note = 2'-O-Methyl nucleotide
  modified_base 18: mod_base = OTHER; note = 2'-fluoro nucleotide
  modified_base 19: mod_base = OTHER; note = 2'-O-Methyl nucleotide
  modified_base 20: mod_base = OTHER; note = 2'-fluoro nucleotide
  modified_base 21: mod_base = OTHER; note = 2'-O-Methyl nucleotide phosphorothioate
  modified_base 22: mod_base = OTHER; note = 2'-O-Methyl nucleotide
  modified_base 23: mod_base = OTHER; note = inverted abasic nucleotide
ntgacgatacagctaattcattn

SEQ ID NO: 2050 - RNA, 21 nt, synthetic construct
  misc_feature 1..21: note = Description of Artificial Sequence: Synthetic oligonucleotide
  source 1..21: mol_type = other RNA
  modified_base 1: mod_base = OTHER; note = 2'-fluoro nucleotide phosphorothioate
  modified_base 2: mod_base = OTHER; note = 2'-fluoro nucleotide phosphorothioate
  modified_base 3: mod_base = OTHER; note = 2'-O-Methyl nucleotide phosphorothioate
  modified_base 4: mod_base = OTHER; note = 2'-fluoro nucleotide
  modified_base 5: mod_base = OTHER; note = 2'-O-Methyl nucleotide
  modified_base 6: mod_base = OTHER; note = 2'-fluoro nucleotide
  modified_base 7: mod_base = OTHER; note = 2'-O-Methyl nucleotide
  modified_base 8: mod_base = OTHER; note = 2'-fluoro nucleotide
  modified_base 9: mod_base = OTHER; note = 2'-O-Methyl nucleotide
  modified_base 10: mod_base = OTHER; note = 2'-fluoro nucleotide
  modified_base 11: mod_base = OTHER; note = 2'-O-Methyl nucleotide
  modified_base 12: mod_base = OTHER; note = 2'-fluoro nucleotide
  modified_base 13: mod_base = OTHER; note = 2'-O-Methyl nucleotide
  modified_base 14: mod_base = OTHER; note = 2'-fluoro nucleotide
  modified_base 15: mod_base = OTHER; note = 2'-O-Methyl nucleotide
  modified_base 16: mod_base = OTHER; note = 2'-fluoro nucleotide
  modified_base 17: mod_base = OTHER; note = 2'-O-Methyl nucleotide
  modified_base 18: mod_base = OTHER; note = 2'-fluoro nucleotide
  modified_base 19: mod_base = OTHER; note = 2'-O-Methyl nucleotide
  modified_base 20: mod_base = OTHER; note = 2'-O-Methyl nucleotide phosphorothioate
  modified_base 21: mod_base = OTHER; note = 2'-O-Methyl nucleotide
tgaattagctgtatcgtcatt

SEQ ID NO: 2051 - RNA, 23 nt, synthetic construct
  misc_feature 1..23: note = Description of Artificial Sequence: Synthetic oligonucleotide
  source 1..23: mol_type = other RNA
  modified_base 1: mod_base = OTHER; note = Cholesterol-inverted abasic nucleotide
  modified_base 2: mod_base = OTHER; note = 2'-O-Methyl nucleotide phosphorothioate
  modified_base 3: mod_base = OTHER; note = 2'-O-Methyl nucleotide
  modified_base 4: mod_base = OTHER; note = 2'-fluoro nucleotide
  modified_base 5: mod_base = OTHER; note = 2'-O-Methyl nucleotide
  modified_base 6: mod_base = OTHER; note = 2'-fluoro nucleotide
  modified_base 7: mod_base = OTHER; note = 2'-O-Methyl nucleotide
  modified_base 8: mod_base = OTHER; note = 2'-fluoro nucleotide
  modified_base 9: mod_base = OTHER; note = 2'-O-Methyl nucleotide
  modified_base 10: mod_base = OTHER; note = 2'-fluoro nucleotide
  modified_base 11: mod_base = OTHER; note = 2'-O-Methyl nucleotide
  modified_base 12: mod_base = OTHER; note = 2'-fluoro nucleotide
  modified_base 13: mod_base = OTHER; note = 2'-O-Methyl nucleotide
  modified_base 14: mod_base = OTHER; note = 2'-fluoro nucleotide
  modified_base 15: mod_base = OTHER; note = 2'-O-Methyl nucleotide
  modified_base 16: mod_base = OTHER; note = 2'-fluoro nucleotide
  modified_base 17: mod_base = OTHER; note = 2'-O-Methyl nucleotide
  modified_base 18: mod_base = OTHER; note = 2'-fluoro nucleotide
  modified_base 19: mod_base = OTHER; note = 2'-O-Methyl nucleotide
  modified_base 20: mod_base = OTHER; note = 2'-fluoro nucleotide
  modified_base 21: mod_base = OTHER; note = 2'-O-Methyl nucleotide phosphorothioate
  modified_base 22: mod_base = OTHER; note = 2'-O-Methyl nucleotide
  modified_base 23: mod_base = OTHER; note = inverted abasic nucleotide
nagtttgccaaggcacgagtttn

SEQ ID NO: 2052 - RNA, 21 nt, synthetic construct
  misc_feature 1..21: note = Description of Artificial Sequence: Synthetic oligonucleotide
  source 1..21: mol_type = other RNA
  modified_base 1: mod_base = OTHER; note = 2'-O-Methyl nucleotide phosphorothioate
  modified_base 2: mod_base = OTHER; note = 2'-fluoro nucleotide phosphorothioate
  modified_base 3: mod_base = OTHER; note = 2'-O-Methyl nucleotide phosphorothioate
  modified_base 4: mod_base = OTHER; note = 2'-fluoro nucleotide
  modified_base 5: mod_base = OTHER; note = 2'-O-Methyl nucleotide
  modified_base 6: mod_base = OTHER; note = 2'-fluoro nucleotide
  modified_base 7: mod_base = OTHER; note = 2'-O-Methyl nucleotide
  modified_base 8: mod_base = OTHER; note = 2'-fluoro nucleotide
  modified_base 9: mod_base = OTHER; note = 2'-O-Methyl nucleotide
  modified_base 10: mod_base = OTHER; note = 2'-fluoro nucleotide
  modified_base 11: mod_base = OTHER; note = 2'-O-Methyl nucleotide
  modified_base 12: mod_base = OTHER; note = 2'-fluoro nucleotide
  modified_base 13: mod_base = OTHER; note = 2'-O-Methyl nucleotide
  modified_base 14: mod_base = OTHER; note = 2'-fluoro nucleotide
  modified_base 15: mod_base = OTHER; note = 2'-O-Methyl nucleotide
  modified_base 16: mod_base = OTHER; note = 2'-fluoro nucleotide
  modified_base 17: mod_base = OTHER; note = 2'-O-Methyl nucleotide
  modified_base 18: mod_base = OTHER; note = 2'-fluoro nucleotide
  modified_base 19: mod_base = OTHER; note = 2'-O-Methyl nucleotide
  modified_base 20: mod_base = OTHER; note = 2'-O-Methyl nucleotide phosphorothioate
  modified_base 21: mod_base = OTHER; note = 2'-O-Methyl nucleotide
actcgtgccttggcaaacttt

SEQ ID NO: 2053 - RNA, 23 nt, synthetic construct
  misc_feature 1..23: note = Description of Artificial Sequence: Synthetic oligonucleotide
  source 1..23: mol_type = other RNA
  modified_base 1: mod_base = OTHER; note = Cholesterol-inverted abasic nucleotide
  modified_base 2: mod_base = OTHER; note = 2'-O-Methyl nucleotide phosphorothioate
  modified_base 3: mod_base = OTHER; note = 2'-O-Methyl nucleotide
  modified_base 4: mod_base = OTHER; note = 2'-fluoro nucleotide
  modified_base 5: mod_base = OTHER; note = 2'-O-Methyl nucleotide
  modified_base 6: mod_base = OTHER; note = 2'-fluoro nucleotide
  modified_base 7: mod_base = OTHER; note = 2'-O-Methyl nucleotide
  modified_base 8: mod_base = OTHER; note = 2'-fluoro nucleotide
  modified_base 9: mod_base = OTHER; note = 2'-O-Methyl nucleotide
  modified_base 10: mod_base = OTHER; note = 2'-fluoro nucleotide
  modified_base 11: mod_base = OTHER; note = 2'-O-Methyl nucleotide
  modified_base 12: mod_base = OTHER; note = 2'-fluoro nucleotide
  modified_base 13: mod_base = OTHER; note = 2'-O-Methyl nucleotide
  modified_base 14: mod_base = OTHER; note = 2'-fluoro nucleotide
  modified_base 15: mod_base = OTHER; note = 2'-O-Methyl nucleotide
  modified_base 16: mod_base = OTHER; note = 2'-fluoro nucleotide
  modified_base 17: mod_base = OTHER; note = 2'-O-Methyl nucleotide
  modified_base 18: mod_base = OTHER; note = 2'-fluoro nucleotide
  modified_base 19: mod_base = OTHER; note = 2'-O-Methyl nucleotide
  modified_base 20: mod_base = OTHER; note = 2'-fluoro nucleotide
  modified_base 21: mod_base = OTHER; note = 2'-O-Methyl nucleotide phosphorothioate
  modified_base 22: mod_base = OTHER; note = 2'-O-Methyl nucleotide
  modified_base 23: mod_base = OTHER; note = inverted abasic nucleotide
nctgttggattgattcgaaattn

SEQ ID NO: 2054 - RNA, 21 nt, synthetic construct
  misc_feature 1..21: note = Description of Artificial Sequence: Synthetic oligonucleotide
  source 1..21: mol_type = other RNA
  modified_base 1: mod_base = OTHER; note = 2'-O-Methyl nucleotide phosphorothioate
  modified_base 2: mod_base = OTHER; note = 2'-fluoro nucleotide phosphorothioate
  modified_base 3: mod_base = OTHER; note = 2'-O-Methyl nucleotide phosphorothioate
  modified_base 4: mod_base = OTHER; note = 2'-fluoro nucleotide
  modified_base 5: mod_base = OTHER; note = 2'-O-Methyl nucleotide
  modified_base 6: mod_base = OTHER; note = 2'-fluoro nucleotide
  modified_base 7: mod_base = OTHER; note = 2'-O-Methyl nucleotide
  modified_base 8: mod_base = OTHER; note = 2'-fluoro nucleotide
  modified_base 9: mod_base = OTHER; note = 2'-O-Methyl nucleotide
  modified_base 10: mod_base = OTHER; note = 2'-fluoro nucleotide
  modified_base 11: mod_base = OTHER; note = 2'-O-Methyl nucleotide
  modified_base 12: mod_base = OTHER; note = 2'-fluoro nucleotide
  modified_base 13: mod_base = OTHER; note = 2'-O-Methyl nucleotide
  modified_base 14: mod_base = OTHER; note = 2'-fluoro nucleotide
  modified_base 15: mod_base = OTHER; note = 2'-O-Methyl nucleotide
  modified_base 16: mod_base = OTHER; note = 2'-fluoro nucleotide
  modified_base 17: mod_base = OTHER; note = 2'-O-Methyl nucleotide
  modified_base 18: mod_base = OTHER; note = 2'-fluoro nucleotide
  modified_base 19: mod_base = OTHER; note = 2'-O-Methyl nucleotide
  modified_base 20: mod_base = OTHER; note = 2'-O-Methyl nucleotide phosphorothioate
  modified_base 21: mod_base = OTHER; note = 2'-O-Methyl nucleotide
tttcgaatcaatccaacagtt

SEQ ID NO: 2055 - protein, 24 aa, synthetic construct
  REGION 1..24: note = Description of Artificial Sequence: Synthetic peptide
CGIFGEIEELIEEGLENLIDWGNA

SEQ ID NO: 2056 - protein, 24 aa, synthetic construct
  REGION 1..24: note = Description of Artificial Sequence: Synthetic peptide
GLFEAIEGFIENGWEGMIDGWYGC

SEQ ID NO: 2057 - protein, 27 aa, synthetic construct
  REGION 1..27: note = Description of Artificial Sequence: Synthetic peptide
GLFEAIEGFIENGWEGMIWDYGSGSCG

SEQ ID NO: 2058 - protein, 23 aa, synthetic construct
  REGION 1..23: note = Description of Artificial Sequence: Synthetic peptide
  SITE 23: note = 6x-polyethylene glycol molecules linked to amine
GLFEAIEGFIENGWEGMIDGWYG

SEQ ID NO: 2059 - protein, 27 aa, synthetic construct
  REGION 1..27: note = Description of Artificial Sequence: Synthetic peptide
  SITE 27: note = 2x N-Acetylgalactosamine linked to a Lysine
GLFEAIEGFIENGWEGMIWDYGSGSCK

SEQ ID NO: 2060 - protein, 27 aa, Apis mellifera
CLIGAILKVLATGLPTLISWIKNKRKQ

SEQ ID NO: 2061 - protein, 26 aa, Apis mellifera
GIGAVLKVLTTGLPALISWIKRKRQQ

SEQ ID NO: 2062 - protein, 13 aa, Mesobuthus eupeus
  SITE 13: note = Amidated residue
IFGAIAGLLKNIF

SEQ ID NO: 2063 - protein, 18 aa, Mesobuthus eupeus
FFGHLFKLATKIIPSLFQ

SEQ ID NO: 2064 - protein, 21 aa, synthetic construct
  REGION 1..21: note = Description of Artificial Sequence: Synthetic peptide
KETWWETWWTEWSQPKKKRKV

SEQ ID NO: 2065 - protein, 19 aa, synthetic construct
  REGION 1..19: note = Description of Artificial Sequence: Synthetic peptide
LLIILRRRRIRKQAHAHSK

SEQ ID NO: 2066 - protein, 26 aa, synthetic construct
  REGION 1..26: note = Description of Artificial Sequence: Synthetic peptide
DPKGDPKGVTVTVTVTVTGKGDPKPD

SEQ ID NO: 2067 - protein, 17 aa, unidentified
  REGION 1..17: note = Description of Unknown: C105Y 1-antitrypsin peptide
CSIPPEVKFNKPFVYLI

SEQ ID NO: 2068 - protein, 27 aa, unidentified
  REGION 1..27: note = Description of Unknown: Transportan galanin and mastoparan peptide
GWTLNSAGYLLGKINLKALAALAKKIL

SEQ ID NO: 2069 - protein, 21 aa, unidentified
  REGION 1..21: note = Description of Unknown: TP10 Galanin and mastoparan peptide
AGYLLGKINLKALAALAKKIL

SEQ ID NO: 2070 - protein, 17 aa, synthetic construct
  REGION 1..17: note = Description of Artificial Sequence: Synthetic peptide
GALFLGFLGAAGSTMGA

SEQ ID NO: 2071 - protein, 20 aa, Herpes simplex virus 1
HGLASTLTRWAHYNALIRAF

SEQ ID NO: 2072 - protein, 20 aa, unidentified
  REGION 1..20: note = Description of Unknown: CADY PPTG1 peptide
GLWRALWRLLRSLWRLLWRA

SEQ ID NO: 2073 - protein, 30 aa, synthetic construct
  REGION 1..30: note = Description of Artificial Sequence: Synthetic polypeptide
WEAALAEALAEALAEHLAEALAEALEALAA

SEQ ID NO: 2074 - protein, 24 aa, synthetic construct
  REGION 1..24: note = Description of Artificial Sequence: Synthetic peptide
GLFEAIEGFIENGWEGMIDGWYGC

SEQ ID NO: 2075 - protein, 23 aa, synthetic construct
  REGION 1..23: note = Description of Artificial Sequence: Synthetic peptide
GLFGAIAGFIENGWEGMIDGWYG

SEQ ID NO: 2076 - protein, 36 aa, synthetic construct
  REGION 1..36: note = Description of Artificial Sequence: Synthetic polypeptide
  SITE 36: note = Amidated residue
GLFGAIAGFIENGWEGMIDGRQIKIWFQNRRMKWKK

SEQ ID NO: 2077 - protein, 26 aa, synthetic construct
  REGION 1..26: note = Description of Artificial Sequence: Synthetic peptide
GLFGAIAGFIENGWEGMIDGSSKKKK

SEQ ID NO: 2078 - protein, 24 aa, synthetic construct
  REGION 1..24: note = Description of Artificial Sequence: Synthetic peptide
GLFEAIAGFIENGWEGMIDGGGYC

SEQ ID NO: 2079 - protein, 23 aa, synthetic construct
  REGION 1..23: note = Description of Artificial Sequence: Synthetic peptide
GLFHAIAHFIHGGWHGLIHGWYG

SEQ ID NO: 2080 - protein, 30 aa, synthetic construct
  REGION 1..30: note = Description of Artificial Sequence: Synthetic polypeptide
  SITE 30: note = 6x-polyethylene glycol molecules linked to amine
GLFEAIEGFIENGWEGLAEALAEALEALAA

SEQ ID NO: 2081 - protein, 29 aa, synthetic construct
  REGION 1..29: note = Description of Artificial Sequence: Synthetic peptide
KWKLFKKIGAVLKVLTTGYGRKKRRQRRR

SEQ ID NO: 2082 - RNA, 21 nt, synthetic construct
  misc_feature 1..21: note = Description of Artificial Sequence: Synthetic oligonucleotide
  source 1..21: mol_type = other RNA
actcgtgccttggcaaacttt

SEQ ID NO: 2083 - RNA, 21 nt, synthetic construct
  misc_feature 1..21: note = Description of Artificial Sequence: Synthetic oligonucleotide
  source 1..21: mol_type = other RNA
agtttgccaaggcacgagttt

SEQ ID NO: 2084 - RNA, 21 nt, synthetic construct
  misc_feature 1..21: note = Description of Artificial Sequence: Synthetic oligonucleotide
  source 1..21: mol_type = other RNA
actcgtgccttggcaaacttt

SEQ ID NO: 2085 - RNA, 21 nt, synthetic construct
  misc_feature 1..21: note = Description of Artificial Sequence: Synthetic oligonucleotide
  source 1..21: mol_type = other RNA
agtttgccaaggcacgagttt

SEQ ID NO: 2086 - RNA, 21 nt, synthetic construct
  misc_feature 1..21: note = Description of Artificial Sequence: Synthetic oligonucleotide
  source 1..21: mol_type = other RNA
actcgtgccttggcaaacttt

SEQ ID NO: 2087 - RNA, 21 nt, synthetic construct
  misc_feature 1..21: note = Description of Artificial Sequence: Synthetic oligonucleotide
  source 1..21: mol_type = other RNA
agtttgccaaggcacgagttt

SEQ ID NO: 2088 - RNA, 21 nt, synthetic construct
  misc_feature 1..21: note = Description of Artificial Sequence: Synthetic oligonucleotide
  source 1..21: mol_type = other RNA
tgaattagctgtatcgtcatt

SEQ ID NO: 2089 - DNA, 21 bp, synthetic construct
  misc_feature 1..21: note = Description of Artificial Sequence: Synthetic oligonucleotide
  source 1..21: mol_type = other DNA
  misc_feature 1: note = DNA
  misc_feature 2..21: note = RNA
tgacgatacagctaattcatt

SEQ ID NO: 2090 - RNA, 21 nt, synthetic construct
  misc_feature 1..21: note = Description of Artificial Sequence: Synthetic oligonucleotide
  source 1..21: mol_type = other RNA
tgaattagctgtatcgtcatt

SEQ ID NO: 2091 - RNA, 21 nt, synthetic construct
  misc_feature 1..21: note = Description of Artificial Sequence: Synthetic oligonucleotide
  source 1..21: mol_type = other RNA
tgacgatacagctaattcatt

SEQ ID NO: 2092 - RNA, 21 nt, synthetic construct
  misc_feature 1..21: note = Description of Artificial Sequence: Synthetic oligonucleotide
  source 1..21: mol_type = other RNA
tgaattagctgtatcgtcatt

SEQ ID NO: 2093 - RNA, 21 nt, synthetic construct
  misc_feature 1..21: note = Description of Artificial Sequence: Synthetic oligonucleotide
  source 1..21: mol_type = other RNA
tgacgatacagctaattcatt

SEQ ID NO: 2094 - RNA, 21 nt, synthetic construct
  misc_feature 1..21: note = Description of Artificial Sequence: Synthetic oligonucleotide
  source 1..21: mol_type = other RNA
taagtataggtcctcattatt

SEQ ID NO: 2095 - RNA, 21 nt, synthetic construct
  misc_feature 1..21: note = Description of Artificial Sequence: Synthetic oligonucleotide
  source 1..21: mol_type = other RNA
taatgaggacctatacttatt

SEQ ID NO: 2096 - DNA, 21 bp, synthetic construct
  misc_feature 1..21: note = Description of Artificial Sequence: Synthetic oligonucleotide
  source 1..21: mol_type = other DNA
  misc_feature 1: note = DNA
  misc_feature 2..21: note = RNA
tttcgaatcaatccaacagtt

SEQ ID NO: 2097 - RNA, 21 nt, synthetic construct
  misc_feature 1..21: note = Description of Artificial Sequence: Synthetic oligonucleotide
  source 1..21: mol_type = other RNA
ctgttggattgattcgaaatt

SEQ ID NO: 2098 - RNA, 21 nt, synthetic construct
  misc_feature 1..21: note = Description of Artificial Sequence: Synthetic oligonucleotide
  source 1..21: mol_type = other RNA
tttcgaatcaatccaacagtt

SEQ ID NO: 2099 - RNA, 21 nt, synthetic construct
  misc_feature 1..21: note = Description of Artificial Sequence: Synthetic oligonucleotide
  source 1..21: mol_type = other RNA
ctgttggattgattcgaaatt

SEQ ID NO: 2100 - RNA, 21 nt, synthetic construct
  misc_feature 1..21: note = Description of Artificial Sequence: Synthetic oligonucleotide
  source 1..21: mol_type = other RNA
tttcgaatcaatccaacagtt

SEQ ID NO: 2101 - RNA, 21 nt, synthetic construct
  misc_feature 1..21: note = Description of Artificial Sequence: Synthetic oligonucleotide
  source 1..21: mol_type = other RNA
ctgttggattgattcgaaatt

SEQ ID NO: 2102 - RNA, 21 nt, synthetic construct
  misc_feature 1..21: note = Description of Artificial Sequence: Synthetic oligonucleotide
  source 1..21: mol_type = other RNA
ataaaatctacagtcatagtt

SEQ ID NO: 2103 - RNA, 21 nt, synthetic construct
  misc_feature 1..21: note = Description of Artificial Sequence: Synthetic oligonucleotide
  source 1..21: mol_type = other RNA
ctatgactgtagattttattt

SEQ ID NO: 2104 - RNA, 21 nt, synthetic construct
  misc_feature 1..21: note = Description of Artificial Sequence: Synthetic oligonucleotide
  source 1..21: mol_type = other RNA
ttaaaatctacagtcatagtt

SEQ ID NO: 2105 - RNA, 21 nt, synthetic construct
  misc_feature 1..21: note = Description of Artificial Sequence: Synthetic oligonucleotide
  source 1..21: mol_type = other RNA
ctatgactgtagattttaatt

SEQ ID NO: 2106 - RNA, 21 nt, synthetic construct
  misc_feature 1..21: note = Description of Artificial Sequence: Synthetic oligonucleotide
  source 1..21: mol_type = other RNA
ttaaaatctacagtcatagtt

SEQ ID NO: 2107 - RNA, 21 nt, synthetic construct
  misc_feature 1..21: note = Description of Artificial Sequence: Synthetic oligonucleotide
  source 1..21: mol_type = other RNA
ctatgactgtagattttaatt

SEQ ID NO: 2108 - RNA, 21 nt, synthetic construct
  misc_feature 1..21: note = Description of Artificial Sequence: Synthetic oligonucleotide
  source 1..21: mol_type = other RNA
gagagctccatagtgacactt

SEQ ID NO: 2109 - RNA, 21 nt, synthetic construct
  misc_feature 1..21: note = Description of Artificial Sequence: Synthetic oligonucleotide
  source 1..21: mol_type = other RNA
gtgtcactatggagctctctt

SEQ ID NO: 2110 - protein, 4 aa, synthetic construct
  REGION 1..4: note = Description of Artificial Sequence: Synthetic peptide
EAFQ

SEQ ID NO: 2111 - protein, 4 aa, synthetic construct
  REGION 1..4: note = Description of Artificial Sequence: Synthetic peptide
GGFG

SEQ ID NO: 2112 - protein, 4 aa, synthetic construct
  REGION 1..4: note = Description of Artificial Sequence: Synthetic peptide
ALAL

SEQ ID NO: 2113 - protein, 4 aa, synthetic construct
  REGION 1..4: note = Description of Artificial Sequence: Synthetic peptide
GFLG

SEQ ID NO: 2114 - DNA, 19 bp, synthetic construct
  misc_feature 1..19: note = Description of Artificial Sequence: Synthetic probe
  source 1..19: mol_type = other DNA
  modified_base 1: mod_base = OTHER; note = nucleotide attached to 6-Carboxyfluorescein-tcactttgt-ZEN quencher
  modified_base 19: mod_base = OTHER; note = 3' Iowa Black FQ (IDT) quencher modified nucleotide
ggatgagtatgaccctacg

SEQ ID NO: 2115 - DNA, 20 bp, synthetic construct
  misc_feature 1..20: note = Description of Artificial Sequence: Synthetic probe
  source 1..20: mol_type = other DNA
  modified_base 1: mod_base = OTHER; note = nucleotide attached to 6-Carboxyfluorescein-ccaacaata-ZEN quencher
  modified_base 20: mod_base = OTHER; note = 3' Iowa Black FQ (IDT) quencher modified nucleotide
gaggattcctacaggaagca

SEQ ID NO: 2116 - RNA, 21 nt, synthetic construct
  misc_feature 1..21: note = Description of Artificial Sequence: Synthetic oligonucleotide
  source 1..21: mol_type = other RNA
tatcgacgtgtccagctagtt

SEQ ID NO: 2117 - DNA, 21 bp, synthetic construct
  misc_feature 1..21: note = Description of Artificial Sequence: Synthetic oligonucleotide
  source 1..21: mol_type = other DNA
  misc_feature 1: note = DNA
  misc_feature 2..21: note = RNA
tctcgtgccttggcaaacttt

What is claimed is:

1. A molecule of Formula:
A-B-(D)n
wherein,
A is a binding moiety;
B is a polynucleotide;
D is an endosomolytic moiety, wherein D is conjugated to the 3′ end or an internal position of B; and
n is an integer from 1 to 10.

2. The molecule of claim 1, wherein the binding moiety is an antibody or antigen binding fragment thereof.

3. The molecule of claim 1, wherein the polynucleotide comprises at least one 2′ modified nucleotide, at least one modified internucleotide linkage, or at least one inverted abasic moiety

4. The molecule of claim 3, wherein the at least one 2′ modified nucleotide comprises 2′-O-methyl, 2′-O-methoxyethyl (2′-O-MOE), 2′-O-aminopropyl, 2′-deoxy, 2′-deoxy-2′-fluoro, 2′-O-aminopropyl (2′-O-AP), 2′-O-dimethylaminoethyl (2′-O-DMAOE), 2′-O-dimethylaminopropyl (2′-O-DMAP), 2′-O-dimethylaminoethyloxyethyl (2′-O-DMAEOE), or 2′-O—N-methylacetamido (2′-O-NMA) modified nucleotide.

5. The molecule of claim 3, wherein the at least one 2′ modified nucleotide comprises locked nucleic acid (LNA) or ethylene nucleic acid (ENA).

6. The molecule of claim 3, wherein the at least one modified internucleotide linkage comprises a phosphorothioate linkage or a phosphorodithioate linkage.

7. The molecule of claim 3, wherein the at least one inverted abasic moiety is at at least one terminus.

8. The molecule of claim 1, wherein the polynucleotide hybridizes to a target region selected from growth factors or mitogens, receptor tyrosine kinases, cytoplasmic tyrosine kinases, cytoplasmic serine/threonine kinases, and regulatory GTPases, and transcription factors.

9. The molecule of claim 1, wherein the polynucleotide comprises a single-stranded polynucleic acid molecule.

10. The molecule of claim 1, wherein the polynucleotide comprises a first polynucleotide and a second polynucleotide hybridized to the first polynucleotide to form a double-stranded polynucleic acid molecule.

11. The molecule of claim 10, wherein the second polynucleotide comprises at least one modification.

12. The molecule of claim 10, wherein the first polynucleotide and the second polynucleotide are RNA molecules.

13. The molecule of claim 2, wherein the antibody or antigen binding fragment thereof binds to a cell surface receptor selected from epidermal growth factor receptor (EGFR), interleukin-2 receptor (IL-2R), transferrin receptor, endothelin receptor type B (ETRB), interleukin-20 receptor subunit alpha (IL20Ra), and cytotoxic T-lymphocyte-associated antigen 4 (CTLA-4) receptor.

14. The molecule of claim 2, wherein the antibody or antigen-binding fragment thereof comprises a humanized antibody or antigen-binding fragment thereof, chimeric antibody or antigen-binding fragment thereof, monoclonal antibody or antigen-binding fragment thereof, monovalent Fab′, divalent Fab2, single-chain variable fragment (scFv), diabody, minibody, nanobody, single-domain antibody (sdAb), or camelid antibody or antigen-binding fragment thereof.

15. The molecule of claim 1, wherein the endosomolytic moiety comprises an endosomolytic polypeptide, an endosomolytic polymer, an endosomolytic lipid, or an endosomolytic small molecule.

16. The molecule of claim 15, wherein the endosomolytic polypeptide comprises INF7 or melittin.

17. The molecule of claim 1, further comprising C, wherein C is a polymer.

18. The molecule of claim 17, wherein the polymer is polyethylene glycol.

19. A molecule of Formula:
A-D-B
wherein,
A is a binding moiety;
B is a polynucleotide; and
D is an endosomolytic moiety, wherein D is conjugated to the 3′ end or an internal position of B.

20. A pharmaceutical composition comprising:
the molecule of claim 1; and
a pharmaceutically acceptable excipient.
